(19) United States
(12) Patent Application Publication
(10) Pub. No.: US 2025/0270523 A1
(43) Pub. Date: Aug. 28, 2025

(54) RNA POLYMERASE VARIANT, AND PREPARATION METHOD THEREFOR AND USE THEREOF IN RNA SYNTHESIS

(71) Applicant: NANJING VAZYME BIOTECH CO., LTD., NANJING (CN)

(72) Inventors: Xiaoyu XU, NANJING (CN); Qiuheng JIN, NANJING (CN); Wei HE, NANJING (CN); Chong WANG, NANJING (CN); Huixue HU, NANJING (CN)

(21) Appl. No.: 18/861,371

(22) PCT Filed: Mar. 1, 2024
(86) PCT No.: PCT/CN2024/079536

§ 371 Date: Oct. 29, 2024

(30) Foreign Application Priority Data
Mar. 1, 2023 (CN) 202310184997.X
May 9, 2023 (CN) 202310515121.9
Aug. 15, 2023 (CN) 202311023160.3
Sep. 20, 2023 (CN) 202311214811.7
Feb. 1, 2024 (CN) 202410141858.3

(51) Int. Cl. C12N 9/12; C12N 15/70; C12P 19/34

(52) U.S. Cl. CPC C12N 9/1247; C12N 15/70; C12P 19/34; C12Y 207/07006

(57) ABSTRACT

Provided are an RNA polymerase variant and a preparation method therefor. When the RNA polymerase variant is used in in-vitro transcription, an RNA product with low dsRNA contamination and a high integrity can be obtained, the utilization efficiency of cap analogs in the co-transcriptional capping reaction system can also be improved, and costs are saved. In addition, further provided is a method for generating RNA by means of in-vitro transcription.

### CROSS-REFERENCE TO RELATED APPLICATIONS

[0001] This application is a U.S. National Stage Application of PCT Application No. PCT/CN2024/079536, filed on Mar. 1, 2024, which claims priority to Chinese Patent Application No. 202310184997.X filed Mar. 1, 2023, No. 202310515121.9 filed May 9, 2023, No. 202311023160.3 filed Aug. 15, 2023, No. 202311214811.7 filed Sep. 20, 2023, and No. 202410141858.3 filed Feb. 1, 2024, the entire contents of which are hereby incorporated by reference in their entirety for all purpose.

### SEQUENCE LISTING

[0002] The instant application contains a Sequence Listing which has been submitted electronically in CRF format and is hereby incorporated by reference in its entirety. Said CRF copy, created on Oct. 8, 2024, and filed herewith is named 456-P0098US_D-CF241100US_Sequence Listing_20241008.xml and is 775,572 bytes in size. The Sequence Listing includes no new matter.

### TECHNICAL FIELD

[0003] The present application belongs to the field of biotechnology, and particularly relates to an RNA polymerase variant, a preparation method therefor, and the use thereof in RNA synthesis.

### BACKGROUND ART

[0004] The global outbreak of Corona Virus Disease 2019 (COVID-19) in late 2019 has caused billions of infections in people worldwide. Before Paxlovid (nirmatrelvir tablets/ritonavir tablets (co-packaged)) was available on the market (Emergency Use Authorization by FDA on Nov. 22, 2021), vaccines became the most effective line of defense against infection. In this massive global fight against the epidemic, billions of people have been vaccinated with COVID-19 vaccines such as BNT162b2 (mRNA vaccine) developed by BioNTech and Pfizer, mRNA-1273 (mRNA vaccine) developed by Moderna, or AZD1222 (adenovirus vector vaccine) developed by AstraZeneca, among which RNA vaccines have the highest protective efficacy. mRNA vaccines have made great contributions to the fight against the epidemic by preventing infection, reducing the rate of severe illness, and curbing the spread of the epidemic.

[0005] The relatively short research and development cycle of mRNA vaccines enables the rapid development of new vaccine candidates to cope with viral mutations. Through the dual mechanism of humoral immunity and T-cell immunity, the vaccines are highly immunogenic and effective, and have a simple production process, which makes them easy to efficiently develop and produce in a large scale, so as to provide a quick and rapid global supply for the fight against the pandemic similar to COVID-19.

[0006] According to the latest news, there has been a breakthrough in the research of circular RNA (circRNA)-related drugs, in addition to mRNA. Orna Therapeutics has developed in-vivo cell therapy products using circRNA, and in a research report presented at the annual meeting of the American Society of Gene and Cell Therapy (ASGCT) in 2022, it has been demonstrated that these products also have great potential in other fields, such as tumor therapy.

[0007] RNA shines in the field of research and development of drugs such as vaccines, but the removal of some impurities in the actual production process requires further study, among which double-stranded RNA (dsRNA) impurities can cause strong immunogenicity (Goubau et al., 2014; Kato et al., 2006; Mu et al., 2018). Therefore, there is an urgent need to develop a method for effectively reducing double-stranded RNA impurities.

### SUMMARY OF THE INVENTION

[0008] The present application provides an RNA polymerase variant, a preparation method therefor, and the use thereof in RNA synthesis. In a first aspect of the present application, the present application provides an RNA polymerase variant, which has an amino acid sequence comprising, relative to SEQ ID NO: 1, at least one, at least two, at least three, at least four, at least five or at least six amino acid mutations at positions selected from D130, N171, K172, R173, Y178, R298, Y385, K387, D388 or F880, wherein the mutation type is selected from a deletion or substitution, and the amino acid sequence of the variant has at least 95%, 96%, 97%, 98% or 99% sequence identity to SEQ ID NO: 1. In some embodiments, the variant comprises one, two, three, four, five or six amino acid mutations at positions selected from D130, N171, K172, R173, Y178, R298, Y385, K387, D388 or F880; the mutation type is selected from a deletion or substitution. In some embodiments, the mutation type is a deletion (denoted by DEL, e.g., DEL5, indicating an amino acid deletion at site 5). In some embodiments, the mutation type is a substitution (e.g., K5A, indicating a mutation of lysine at site 5 into alanine). In some embodiments, the mutation type comprises deletions and substitutions, i.e., deletions occurring at some positions and substitutions occurring at some other positions.

[0009] In some embodiments, the RNA polymerase variant provided by the present application has an amino acid sequence having, relative to SEQ ID NO: 1, one amino acid mutation, the site of the amino acid mutation is selected from N171, K172, R173, Y178, R298, Y385, K387, D388 or F880, and the mutation type is a substitution or deletion. In some embodiments, the amino acid sequence of the variant has, relative to SEQ ID NO: 1, one amino acid mutation, and the mutation is selected from:
[0010] (1) a substitution at position N171, wherein the amino acid for the substitution is G; or
[0011] (2) a substitution or deletion at position K172, wherein an amino acid for the substitution may be selected from A, G, E, D, H, Y, S, W, P, I, M, V, F, T, C, N, L; or
[0012] (3) a substitution or deletion at position R173, wherein an amino acid for the substitution may be selected from A, C, G, E, D, H, Y, S, W, P, N, Q; or
[0013] (4) a substitution at position Y178, wherein an amino acid for the substitution is H; or
[0014] (5) a substitution at position R298, wherein an amino acid for the substitution is A; or
[0015] (6) a substitution at position Y385, wherein an amino acid for the substitution may be selected from A, E, D; or
[0016] (7) a substitution at position K387, wherein an amino acid for the substitution may be selected from A, Y, S, Q; or
[0017] (8) a substitution at position D388, wherein an amino acid for the substitution may be selected from A, G, L; or
[0018] (9) a substitution at position F880, wherein an amino acid for the substitution may be selected from A, G, W.

[0019] In some embodiments, the RNA polymerase variant provided by the present application has an amino acid sequence comprising, relative to SEQ ID NO: 1, two, three, four or five amino acid mutations at positions selected from D130, K172, R173, Y178, R298, Y385, K387, D388 or F880, and the amino acid sequence of the variant has at least 95%, 96%, 97%, 98%, 99% or 99.5% sequence identity to SEQ ID NO: 1. In some embodiments, the variant comprises: (1) a mutation at position K172, and also one, two, three or four amino acid mutations at positions selected from D130, R173, Y178, R298, Y385, K387, D388 or F880, wherein the mutation type is a substitution or deletion; or (2) a mutation at position R173, and also one, two or three amino acid mutations at positions selected from D130, Y178, R298, K387 or D388, wherein the mutation type is a substitution or deletion; or (3) two or three amino acid mutations at positions selected from R298, Y385, K387 or D388, wherein the mutation type is a substitution or deletion. In some embodiments, the amino acid sequence of the variant has, relative to SEQ ID NO: 1, a mutation site combination selected from any one of: K172+R173, D130+K172, K172+K387, K172+F880, K172+D388, K172+R298, D130+R173, R173+Y178, R173+D388, R173+R298, K387+R298, Y385+R298, D388+R298, Y385+K387, Y385+D388, K387+D388, K172+R173+Y385, K172+R173+D388, K172+R173+K387, K172+R173+F880, K172+R173+Y178, D130+K172+R173, D130+K172+Y178, D130+K172+K387, D130+R173+D388, K172+Y178+D388, D130+K172+D388, K172+K387+R298, Y385+K387+D388, K172+R173+Y385+F880, K172+R173+D388+F880, K172+R173+Y178+D388, D130+K172+R173+D388, D130+K172+R173+Y178, D130+R173+Y178+K387, D130+K172+Y178+D388, D130+K172+R173+Y178+D388. In some embodiments, further, the mutation type at position D130 in the variant is D130E. In some embodiments, further, the mutation type at position K172 in the variant may be selected from DEL172, K172A or K172G. In some embodiments, further, the mutation type at position R173 in the variant may be selected from DEL173, R173A, R173G or R173C. In some embodiments, further, the mutation type at position Y178 in the variant may be selected from Y178H or Y178P. In some embodiments, further, the mutation type at position R298 in the variant is R298A. In some embodiments, further, the mutation type at position Y385 in the variant is Y385A. In some embodiments, further, the mutation type at position K387 in the variant may be selected from K387S, K387Y or K387G. In some embodiments, further, the mutation type at position D388 in the variant may be selected from D388Y, D388A or D388G. In some embodiments, further, the mutation type at position F880 in the variant may be selected from F880A or F880Y.

[0020] In some embodiments, the variant comprises a mutation at position K172, and also comprises one, two, three or four amino acid mutations at positions selected from D130, R173, Y178, R298, Y385, K387, D388 or F880, the mutation type is a substitution or deletion, and the amino acid sequence of the variant has at least 95%, 96%, 97%, 98%, 99% or 99.5% sequence identity to SEQ ID NO: 1. In some embodiments, the variant comprises a mutation combination selected from any one of: K172+R173, D130+K172, K172+K387, K172+F880, K172+D388, K172+R298, K172+R173+Y385, K172+R173+D388, K172+R173+K387, K172+R173+F880, K172+R173+Y178, D130+K172+R173, D130+K172+Y178, D130+K172+K387, K172+Y178+D388, D130+K172+D388, K172+K387+R298, K172+R173+Y385+F880, K172+R173+D388+F880, K172+R173+Y178+D388, D130+K172+R173+D388, D130+K172+R173+Y178, D130+K172+Y178+D388, D130+K172+R173+Y178+D388. In some embodiments, further, the mutation type at position D130 in the variant is D130E. In some embodiments, further, the mutation type at position K172 in the variant may be selected from DEL172, K172A or K172G. In some embodiments, further, the mutation type at position R173 in the variant may be selected from DEL173, R173A, R173G or R173C. In some embodiments, further, the mutation type at position Y178 in the variant is Y178H. Further, the mutation type at position R298 in the variant is R298A. In some embodiments, further, the mutation type at position Y385 in the variant is Y385A. In some embodiments, further, the mutation type at position K387 in the variant may be selected from K387S, K387Y or K387G. In some embodiments, further, the mutation type at position D388 in the variant may be selected from D388Y, D388A or D388G. In some embodiments, further, the mutation type at position F880 in the variant may be selected from F880A or F880Y.

[0021] In some embodiments, the variant comprises a mutation at position R173, and also comprises one, two or three amino acid mutations at positions selected from D130, Y178, R298, K387, D388 or F880, the mutation type is a substitution or deletion, and the amino acid sequence of the variant has at least 95%, 96%, 97%, 98%, 99% or 99.5% sequence identity to SEQ ID NO: 1. In some embodiments, the variant comprises a mutation combination selected from any one of: D130+R173, R173+Y178, R173+D388, R173+R298, D130+R173+D388, D130+R173+Y178+K387. In some embodiments, further, the mutation type at position D130 in the variant is D130E. In some embodiments, further, the mutation type at position R173 in the variant may be selected from DEL173, R173A, R173G or R173C. In some embodiments, further, the mutation type at position Y178 in the variant is Y178H or Y178P. In some embodiments, further, the mutation type at position R298 in the variant is R298A. In some embodiments, further, the mutation type at position K387 in the variant is K387Y. In some embodiments, further, the mutation type at position D388 in the variant may be selected from D388Y or D388G.

[0022] In some embodiments, the variant comprises any two or three amino acid mutations at positions selected from R298, Y385, K387 or D388, the mutation type is a substitution or deletion, and the amino acid sequence of the variant has at least 95%, 96%, 97%, 98%, 99% or 99.5% sequence identity to SEQ ID NO: 1. In some embodiments, the variant comprises a mutation combination selected from any one of: K387+R298, Y385+R298, D388+R298, Y385+K387, Y385+D388, K387+D388, Y385+K387+D388. In some embodiments, further, the mutation type at position R298 in the variant is R298A. In some embodiments, further, the substitution at position Y385 in the variant is Y385A. In some embodiments, further, the substitution at position K387 in the variant may be selected from K387S or K387Y. In some embodiments, further, the substitution at position D388 in the variant may be selected from D388A or D388G.

[0023] In some embodiments, the amino acid sequence of the variant of the present application has at least 99.0%, at least 99.1%, at least 99.2%, at least 99.3%, at least 99.4%, at least 99.5%, at least 99.6%, at least 99.7%, at least 99.8%, at least 99.9% or more sequence identity to the amino acid sequence selected from any one of amino acid sequences set forth in SEQ ID NOs: 2-141. In some embodiments, the amino acid sequence of the variant of the present application is selected from SEQ ID NOs: 2-141.

[0024] In a second aspect, the present application provides a method for preparing an RNA polymerase variant, which method comprises generating at least one RNA polymerase variant of the present application in a host cell. In some embodiments, the host cell contains an expression vector carrying a nucleotide sequence corresponding to the RNA polymerase variant of the present application. In some embodiments, in the nucleotide sequence, various modifications may be present in the coding region, as long as the amino acid sequence of the variants of the present application does not vary with the degeneracy of codons or does not vary with preferred codons in an organism expressing the variant. In some embodiments, the nucleotide sequence is selected from SEQ ID NOs: 143-282.

[0025] In a third aspect, the present application provides a method for reducing the generation of dsRNA impurities during the preparation of RNA by in-vitro transcription, which method comprises bringing a DNA template into contact with one or more RNA polymerase variants of the present application, and performing incubation in an in-vitro transcription system.

[0026] In a fourth aspect, the present application provides a method for increasing the integrity of an RNA product in in-vitro transcription, which method comprises bringing a DNA template into contact with one or more RNA polymerase variants of the present application, and performing incubation in an in-vitro transcription system.

[0027] In a fifth aspect, the present application provides a method for generating RNA, which method comprises under conditions resulting in the generation of an RNA product in transcription, bringing a DNA template into contact with one or more RNA polymerase variants of the present application, and performing incubation in an in-vitro transcription system.

[0028] In some embodiments, the RNA prepared using the method of the present application may be a coding RNA or a non-coding RNA, including, but not limited to mRNA, siRNA, gRNA, saRNA, dsRNA, ssRNA, miRNA, piRNA, shRNA, etc. In some embodiments, the RNA product is mRNA. In some embodiments, the RNA product is saRNA.

[0029] In some embodiments, the length of the DNA template may be selected from 1000-13000 bp. In some embodiments, the length of the DNA template may be selected from 8000-13000 bp. In some embodiments, the length of the DNA template may be selected from 10000-13000 bp.

[0030] In some embodiments, the RNA generated using the method of the present application has, upon purification, a reduction in residual dsRNA impurities by at least 50%, at least 55%, at least 60%, at least 65%, at least 70%, at least 75%, at least 80%, at least 85%, at least 90%, at least 95% or more compared with that using wild-type RNA polymerase (SEQ ID NO: 1). In some embodiments, the RNA generated using the method of the present application has, upon purification, a dsRNA impurity percentage (residual dsRNA impurities/total RNA) of less than 0.04%, less than 0.03%, less than 0.02%, less than 0.01%, less than 0.005%, less than 0.004%, less than 0.003%, less than 0.002%, less than 0.001%, less than 0.0005%, less than 0.0003% or less than 0.0001%.

[0031] In some embodiments, the mRNA generated using the method of the present application has, upon purification, an increase in the integrity of mRNA product by at least about 1%, at least about 2%, about 3%, about 4%, about 5%, about 6%, about 7%, about 8%, about 9%, about 10%, about 11%, about 12%, about 13%, about 14% or about 15% compared with that using wild-type T7 RNA polymerase (SEQ ID NO: 1).

[0032] In some embodiments, the saRNA generated using the method of the present application has, upon purification, an increase in the integrity of saRNA product by at least about 3%, about 5%, about 10%, about 12%, about 14%, about 15%, about 16%, about 17%, about 18%, about 19%, about 20%, about 21%, about 22%, about 23%, about 24%, about 25%, about 26%, about 27%, about 28%, about 29% or about 30% compared with that using wild-type T7 RNA polymerase.

[0033] In a sixth aspect, the present application provides a method for generating capped RNA by in-vitro transcription, which method comprises incubating a DNA template with one or more RNA polymerase variants of the present application and a cap analog in an in-vitro transcription reaction system.

[0034] In some embodiments, the cap analog is a dinucleotide cap, a trinucleotide cap or a tetranucleotide cap. In some embodiments, the cap analog is a trinucleotide cap. In some embodiments, the trinucleotide cap is selected from GAA, GAC, GAG, GAU, GCA, GCC, GCG, GCU, GGA, GGC, GGG, GGU, GUA, GUC, GUG and GUU. In some embodiments, the trinucleotide cap is selected from m⁷GpppApA, m⁷GpppApC, m⁷GpppApG, m⁷GpppApU, m⁷GpppCpA, m⁷GpppCpC, m⁷GpppCpG, m⁷GpppCpU, m⁷GpppGpA, m⁷GpppGpC, m⁷GpppGpG, m⁷GpppGpU, m⁷GpppUpA, m⁷GpppUpC, m⁷GpppUpG, and m⁷GpppUpU. In some embodiments, the trinucleotide cap is selected from m⁷G_{3′OMe}pppApA, m⁷G_{3′OMe}pppApC, m⁷G_{3′OMe}pppApG, m⁷G_{3′OMe}pppApU, m⁷G_{3′OMe}pppCpA, m⁷G_{3′OMe}pppCpC, m⁷G_{3′OMe}pppCpG, m⁷G_{3′OMe}pppCpU, m⁷G_{3′OMe}pppGpA, m⁷G_{3′OMe}pppGpC, m⁷G_{3′OMe}pppGpG, m⁷G_{3′OMe}pppGpU, m⁷G_{3′OMe}pppUpA, m⁷G_{3′OMe}pppUpC, m⁷G_{3′OMe}pppUpG, and m⁷G_{3′OMe}pppUpU. In some embodiments, the trinucleotide cap is selected from m⁷G_{3′OMe}pppA_{2′OMe}pA, m⁷G_{3′OMe}pppA_{2′OMe}pC, m⁷G_{3′OMe}pppA_{2′OMe}pG, m⁷G_{3′OMe}pppA_{2′OMe}pU, m⁷G_{3′OMe}pppC_{2′OMe}pA, m⁷G_{3′OMe}pppC_{2′OMe}pC, m⁷G_{3′OMe}pppC_{2′OMe}pG, m⁷G_{3′OMe}pppC_{2′OMe}pU, m⁷G_{3′OMe}pppG_{2′OMe}pA, m⁷G_{3′OMe}pppG_{2′OMe}pC, m⁷G_{3′OMe}pppG_{2′OMe}pG, m⁷G_{3′OMe}pppG_{2′OMe}pU, m⁷G_{3′OMe}pppU_{2′OMe}pA, m⁷G_{3′OMe}pppU_{2′OMe}pC, m⁷G_{3′OMe}pppU_{2′OMe}pG, and m⁷G_{3′OMe}pppU_{2′OMe}pU. In some embodiments, the trinucleotide cap is selected from m⁷GpppA_{2′OMe}pA, m⁷GpppA_{2′OMe}pC, m⁷GpppA_{2′OMe}pG, m⁷GpppA_{2′OMe}pU, m⁷GpppC_{2′OMe}pA, m⁷GpppC_{2′OMe}pC, m⁷GpppC_{2′OMe}pG, m⁷GpppC_{2′OMe}pU, m⁷GpppG_{2′OMe}pA, m⁷GpppG_{2′OMe}pC, m⁷GpppG_{2′OMe}pG, m⁷GpppG_{2′OMe}pU, m⁷GpppU_{2′OMe}pA, m⁷GpppU_{2′OMe}pC, m⁷GpppU_{2′OMe}pG, and m⁷GpppU_{2′OMe}pU. In some embodiments, the trinucleotide cap is preferably m⁷GpppA_{2′OMe}pG.

[0035] In some embodiment, the in-vitro transcriptional capping reaction using the polymerase variant of the present application has an increase in the capping rate of mRNA product to 90%, 91%, 92%, 93%, 94%, 95%, 96%, 97%, 98%, 99% or 100% compared with that using wild-type T7 RNA polymerase (SEQ ID NO: 1). In some embodiments, the increase in the capping rate of mRNA product may be 100%.

[0036] In a seventh aspect, the present application provides a method of performing in-vitro transcription, which method comprises under conditions resulting in the generation of an RNA product in transcription, bringing a DNA template into contact with one or more RNA polymerase variants of the present application, and performing incubation in an in-vitro transcription system. In some embodiments, the method comprises the following steps: 1) providing a DNA template containing a T7 promoter, wherein the T7 promoter is functionally linked to a target nucleotide sequence to be transcribed; 2) bringing one or more RNA polymerase variants of the present application into contact with the DNA template in step 1); 3) incubating the DNA template and the RNA polymerase variant in an in-vitro transcription system.

[0037] In some embodiments, the incubation temperature in step 3) is 30° C. to 50° C., preferably 37° C. In some embodiments, the incubation time in step 3) is 20 to 240 min, preferably 60 min.

[0038] The in-vitro transcription system of the present application comprises a riboside triphosphate and a buffer component.

[0039] In some embodiments, the riboside triphosphate may be selected from a modified or unmodified nucleoside triphosphate (including analogs thereof). In some embodiments, the riboside triphosphate may be selected from unmodified ATP, GTP, CTP, UTP. In some embodiments, the riboside triphosphate may be selected from a modified nucleoside triphosphate, including, but not limited to m1A (N1-methyladenosine), m6A (N6-methyladenosine), m5C (5-methylcytidine), 5moU (5-methoxyuridine), yr (pseudouridine), mlyr (N1-methyl-pseudouridine), riboside triphosphate with a marker (the marker may be biotin, a fluorescent substance, digoxin, a radioactive element, etc.).

[0040] In some embodiments, the in-vitro transcription system further comprises an RNase inhibitor, an inorganic pyrophosphatase, magnesium ions. In some embodiments, the in-vitro transcription system further comprises DEPC-treated water.

[0041] In an eighth aspect, the present application provides a composition or a kit, which comprises one or more RNA polymerase variants of the present application.

[0042] In one embodiment, the composition or the kit further comprises one or more buffer components. In one embodiment, the composition or the kit further comprises one or more in-vitro transcription system components, wherein the in-vitro transcription component may be selected from a riboside triphosphate, an RNase inhibitor, an inorganic pyrophosphatase, magnesium ions, etc. In one embodiment, the in-vitro transcription system component may be selected from a commercially available mRNA in-vitro transcription reagent.

[0043] In some embodiments, the composition or the kit further comprises a cap analog. In some embodiments, the cap analog is a dinucleotide cap, a trinucleotide cap or a tetranucleotide cap. In some embodiments, the cap analog is a trinucleotide cap. In some embodiments, the trinucleotide cap is selected from GAA, GAC, GAG, GAU, GCA, GCC, GCG, GCU, GGA, GGC, GGG, GGU, GUA, GUC, GUG and GUU. In some embodiments, the trinucleotide cap is preferably m7GpppA2′OMepG.

[0044] In a ninth aspect, the present application provides a composition, which comprises RNA and a pharmaceutically acceptable excipient, wherein the RNA is generated by the in-vitro transcription method of the present application. In some embodiments, the RNA product is not chemically modified. In some embodiments, the RNA product is chemically modified.

### OTHER EMBODIMENTS

[0045] 1. An RNA polymerase variant, having an amino acid sequence comprising, relative to SEQ ID NO: 1, one, two, three, four or five amino acid mutations at positions selected from D130, N171, K172, R173, Y178, R298, Y385, K387, D388 or F880, wherein the mutation type is a substitution or deletion, and the amino acid sequence of the variant has at least 97%, at least 98% or at least 99% sequence identity to SEQ ID NO: 1.

[0046] 2. The variant according to item 1, wherein the amino acid sequence of the variant has, relative to SEQ ID NO: 1, one amino acid mutation, and the position of the amino acid mutation is selected from N171, K172, R173, Y178, R298, Y385, K387, D388 or F880.

[0047] 3. The variant according to item 1, wherein the amino acid sequence of the variant comprises, relative to SEQ ID NO: 1:
[0048] (1) a mutation at position K172, and also any one, two, three or four amino acid mutations at positions selected from D130, R173, Y178, R298, Y385, K387, D388 or F880, wherein the mutation type is a substitution or deletion; or
[0049] (2) a mutation at site K173, and also any one, two or three amino acid mutations at positions selected from D130, Y178, R298, K387 or D388, wherein the mutation type is a substitution or deletion; or
[0050] (3) any two or three amino acid mutations at positions selected from R298, Y385, K387 or D388, wherein the mutation type is a substitution.

[0051] 4. The variant according to item 3, wherein the variant comprises a mutation combination selected from any one of: K172+R173, D130+K172, K172+K387, K172+F880, K172+D388, K172+R298, D130+R173, R173+Y178, R173+D388, R173+R298, K387+R298, Y385+R298, D388+R298, Y385+K387, Y385+D388, K387+D388, K172+R173+Y385, K172+R173+D388, K172+R173+K387, K172+R173+F880, K172+R173+Y178, D130+K172+R173, D130+K172+Y178, D130+K172+K387, D130+R173+D388, K172+Y178+D388, D130+K172+D388, K172+K387+R298, Y385+K387+D388, K172+R173+Y385+F880, K172+R173+D388+F880, K172+R173+Y178+D388, D130+K172+R173+D388, D130+K172+R173+Y178, D130+R173+Y178+K387, D130+K172+Y178+D388, or D130+K172+R173+Y178+D388.

[0052] 5. The variant according to item 2, wherein
[0053] 1) the mutation type at position N171 is N171G;
[0054] 2) the mutation type at position K172 is selected from DEL172, K172A, K172H, K172R, K172Y, K172S, K172E, K172D, K172W, K172F, K172I, K172M, K172V, K172P, K172T, K172C, K172N, K172Q, K172G or K172L;
[0055] 3) the mutation type at position R173 is selected from DEL173, R173A, R173H, R173R, R173Y, R173S, R173E, R173D, R173W, R173F, R173I, R173M, R173V, R173P, R173T, R173C, R173N, R173Q, R173G or R173L;
[0056] 4) the mutation type at position Y178 is Y178H;
[0057] 5) the mutation type at position R298 is R298A;
[0058] 6) the mutation type at position Y385 is selected from Y385A, Y385D or Y385E;
[0059] 7) the mutation type at position K387 is selected from K387Q, K387Y, K387S or K387A;
[0060] 8) the mutation type at position D388 is selected from D388A, D388G or D388L; and
[0061] 9) the mutation type at position F880 is selected from F880A, F880G or F880W.

[0062] 6. The variant according to item 3 or item 4, wherein
[0063] 1) the mutation type at position D130 is D130E;
[0064] 2) the mutation type at position K172 may be selected from DEL172, K172A or K172G;
[0065] 3) the mutation type at position R173 may be selected from DEL173, R173A, R173G or R173C;
[0066] 4) the mutation type at position Y178 may be selected from Y178H or Y178P;
[0067] 5) the mutation type at position R298 is R298A;
[0068] 6) the mutation type at position Y385 is Y385A;
[0069] 7) the mutation type at position K387 may be selected from K387S, K387Y or K387G;
[0070] 8) the mutation type at position D388 may be selected from D388Y, D388A or D388G; and
[0071] 9) the mutation type at position F880 may be selected from F880A or F880Y.

[0072] 7. The variant according to item 1, wherein the amino acid sequence of the variant is set forth in any one of SEQ ID NOs: 2-141.

[0073] 8. A nucleotide sequence encoding the variant according to any one of items 1-7.

[0074] 9. A method for preparing an RNA polymerase variant, comprising generating at least one RNA polymerase variant according to any one of items 1-7 in a host cell, wherein the host cell contains an expression vector carrying the nucleotide sequence according to item 8.

[0075] 10. A method for reducing the generation of dsRNA impurities during the preparation of RNA by in-vitro transcription, comprising bringing a DNA template into contact with the variant according to any one of items 1-7, and performing incubation in an in-vitro transcription system.

[0076] 11. A method for increasing the integrity of an RNA product in in-vitro transcription, comprising bringing a DNA template into contact with the variant according to any one of items 1-7, and performing incubation in an in-vitro transcription system.

[0077] 12. Use of at least one variant according to any one of items 1-7 or the method according to items 10-11 in the generation of RNA by in-vitro transcription.

[0078] 13. A method for generating RNA by in-vitro transcription, comprising bringing a DNA template into contact with at least one variant according to any one of items 1-7, and performing incubation in an in-vitro transcription system.

[0079] 14. A method for generating capped RNA by in-vitro transcription, comprising bringing a DNA template into contact with at least one variant according to any one of items 1-7 and a cap analog, and performing incubation in an in-vitro transcription reaction system.

[0080] 15. A composition or kit, comprising at least one RNA polymerase variant according to any one of items 1-7 and at least one buffer component.

[0081] 16. The composition or kit according to item 15, further comprising a cap analog.

[0082] The present application has the following beneficial effects:

[0083] The RNA polymerase variants of the present application have high catalytic efficiency, and can reduce the generation of double-stranded RNA impurities when used in mRNA synthesis. Compared with the existing reported mRNA preparation method, the preparation method of the present application has the lowest generation of double-stranded RNA impurities, and is a safe and green mRNA preparation method with a low content of double-stranded RNA impurities. Using the mRNA preparation method of the present application, the possibility of immunogenicity caused by double-stranded RNA impurities can be greatly reduced. In addition, some of the RNA polymerase variants provided by the present application are able of increasing the integrity of RNA product in in-vitro transcription. The variant DEL172+K387S can also improve the utilization efficiency of the cap analog in the co-transcriptional capping reaction, thus saving costs.

### BRIEF DESCRIPTION OF THE DRAWINGS

[0084] FIG. 1 is a schematic diagram of the construction of recombinant plasmid.

### DETAILED DESCRIPTION OF EMBODIMENTS

[0085] In the examples of the present application, the enzyme activity is defined as follows: the amount of enzyme required to generate 1 μmol product or convert 1 μmol substrate in 1 min under specific reaction conditions.

### Example 1 Preparation of RNA Polymerase Variants

[0086] The DNA sequences (SEQ ID NOs: 142-282) of the RNA polymerase and the variants thereof as shown in Table 1 were synthesized, then amplified by PCR, and then respectively introduced into the BseRI and HindIII cleavage sites of an expression vector pQE-80L to obtain recombinant expression vectors. The constructed vector was introduced into E. coli BL21 (DE3) by chemical transformation technology. The transformed E. coli BL21 (DE3) was coated on an ampicillin-resistant LB plate, and the plate was placed in an incubator at 37° C. overnight. The single colonies growing in the plate were subjected to plasma extraction and sequencing, and finally recombinant engineered bacteria containing the gene of interest were obtained. The E. coli recombinant strain with correct sequencing was inoculated into an LB medium for activation culture overnight, then inoculated into a fermentation broth (LB medium) at 1% to 5% V/V, and cultured until the OD 600 value was 0.6 to 0.8. IPTG with a final concentration of 0.5 mol/L was added for continuing culture for 4-6 h. The strain was collected by centrifugation at 5° C. at 12000 rpm. The collected strain was washed with a 0.2 M PBS buffer with a pH value of 7.0 to obtain bacteria. After ultrasonic disruption, purification was performed by affinity chromatography to obtain an RNA polymerase stock solution.

[0087] WT is a wild-type T7 RNA polymerase variant having an amino acid sequence:

(SEQ ID NO: 1)
MNTINIAKNDFSDIELAAIPFNTLADHYGERLAREQLALEHESYEMGEA
RFRKMFERQLKAGEVADNAAAKPLITTLLPKMIARINDWFEEVKAKRGK
RPTAFQFLQEIKPEAVAYITIKTTLACLTSADNTTVQAVASAIGRAIED
EARFGRIRDLEAKHFKKNVEEQLNKRVGHVYKKAFMQVVEADMLSKGLL
GGEAWSSWHKEDSIHVGVRCIEMLIESTGMVSLHRQNAGVVGODSETIE
LAPEYAEAIATRAGALAGISPMFQPCVVPPKPWTGITGGGYWANGRRPL
ALVRTHSKKALMRYEDVYMPEVYKAINIAQNTAWKINKKVLAVANVITK
WKHCPVEDIPAIEREELPMKPEDIDMNPEALTAWKRAAAAVYRKDKARK
SRRISLEFMLEQANKFANHKAIWFPYNMDWRGRVYAVSMFNPQGNDMTK
GLLTLAKGKPIGKEGYYWLKIHGANCAGVDKVPFPERIKFIEENHENIM
ACAKSPLENTWWAEQDSPFCFLAFCFEYAGVQHHGLSYNCSLPLAFDGS
CSGIQHFSAMLRDEVGGRAVNLLPSETVQDIYGIVAKKVNEILQADAIN
GTDNEVVTVTDENTGEISEKVKLGTKALAGQWLAYGVTRSVTKRSVMTL
AYGSKEFGFRQQVLEDTIQPAIDSGKGLMFTQPNQAAGYMAKLIWESVS
FGTIPADAANLFKAVRETMVDTYESCDVLADFYDQFADQLHESQLDKMP
AVTVVAAVEAMNWLKSAAKLLAAEVKDKKTGEILRKRCAVHWVTPDGFP
VWQEYKKPIQTRLNLMFLGQFRLQPTINTNKDSEIDAHKQESGIAPNFV
HSQDGSHLRKTVVWAHEKYGIESFALIHDSLPAKGNLNLRDILESDFAF
A

[0088] The RNA polymerase variants and the mutation sites thereof are as shown in Table 1:

TABLE 1
Mutation sites of RNA polymerase variants and
corresponding amino acid sequence numbers

| | Mutation site |
|---|---|
| No. | (relative to SEQ ID NO: 1) |
| 1 | WT |
| 2 | K172A |
| 3 | K172G |
| 4 | DEL172 |
| 5 | DEL173 |
| 6 | R173C |
| 7 | R173G |
| 8 | K172A + R173A |
| 9 | K172G + R173A |
| 10 | K172A + R173G |
| 11 | K172G + R173G |
| 12 | DEL172-173 |
| 13 | DEL172-173 + Y385A |
| 14 | DEL172-173 + D388A |
| 15 | DEL172-173 + D388G |
| 16 | DEL172-173 + Y385A + F880Y |
| 17 | DEL172-173 + D388G + F880Y |
| 18 | Y178H |
| 19 | Y385A |
| 20 | Y385D |
| 21 | F880A |
| 22 | F880G |
| 23 | F880W |
| 24 | D388A |
| 25 | D388G |
| 26 | N171G |
| 27 | K172E |
| 28 | K172D |
| 29 | R173E |
| 30 | R173D |
| 31 | R173A |
| 32 | K172A + R173G + Y385A |
| 33 | K172A + R173G + D388Y |
| 34 | K172A + R173G + F880Y |
| 35 | K172G + R173G + Y385A |
| 36 | K172G + R173G + D388Y |
| 37 | K172G + R173G + F880Y |
| 38 | DEL172-173 + F880Y |
| 39 | DEL172-173 + Y178H |
| 40 | DEL172-173 + D130E |
| 41 | DEL172 + R173A |
| 42 | DEL172 + R173C |
| 43 | DEL172 + R173G |
| 44 | DEL172 + D130E |
| 45 | DEL172 + K387S |
| 46 | DEL172 + K387Y |
| 47 | DEL172 + F880A |
| 48 | R298A |
| 49 | Y385E |
| 50 | K387Q |
| 51 | K387Y |
| 52 | K387S |
| 53 | D388L |
| 54 | D130E + K172A + R173G + Y178H + D388G |
| 55 | D130E + R173G |
| 56 | D130E + K172G + Y178H + D388G |
| 57 | K172A + R173C + Y178H + D388G |
| 58 | D130E + K172G + R173C + D388Y |
| 59 | D130E + K172G + R173G + Y178H |
| 60 | R173A + Y178H |
| 61 | D130E + K172A + Y178H |
| 62 | D130E + K172A + R173A |
| 63 | D130E + K172G + R173G + D388G |
| 64 | D130E + K172G + R173C + Y178H + D388Y |
| 65 | K172G + D388Y |
| 66 | D130E + K172A |
| 67 | D130E + R173A + D388G |
| 68 | K172A + D388Y |
| 69 | D130E + K172A + R173C + D388G |
| 70 | D130E + R173C |
| 71 | R173A + D388Y |
| 72 | D130E + R173A |
| 73 | D130E + K172A + Y178H + D388Y |
| 74 | D130E + K172A + R173G + Y178H |
| 75 | K172A + Y178H + D388Y |
| 76 | D130E + K172G + D388Y |
| 77 | D130E + K172A + R173C + Y178H + D388Y |
| 78 | D130E + K172G + R173C + Y178H + D388G |
| 79 | D130E + K172A + R173G + D388Y |
| 80 | K172A + R173C + D388Y |
| 81 | K172A + R173A + D388Y |
| 82 | DEL172 + K387G |
| 83 | D130E + R173G + Y178P + K387Y |
| 84 | DEL172-173 + K387G |
| 85 | DEL172-173 + K387Y |
| 86 | DEL172 + R173A + K387S |
| 87 | DEL172 + R173G + K387S |
| 88 | K172A + DEL173 |
| 89 | K172G + DEL173 |
| 90 | DEL172 + R298A |
| 91 | DEL173 + R298A |
| 92 | K387S + R298A |
| 93 | K387Y + R298A |
| 94 | Y385A + R298A |
| 95 | D388A + R298A |
| 96 | DEL172 + K387S + R298A |
| 97 | Y385A + K387Y |
| 98 | Y385A + K387S |
| 99 | Y385A + D388G |
| 100 | K387Y + D388A |
| 101 | K387Y + D388G |
| 102 | K387S + D388A |
| 103 | Y385A + K387Y + D388G |
| 104 | Y385A + K387S + D388G |
| 105 | Y385A + K387Y + D388A |
| 106 | Y385A + K387S + D388A |
| 107 | K172H |
| 108 | K172Y |
| 109 | K172S |
| 110 | K172W |
| 111 | K172F |
| 112 | K172I |
| 113 | K172M |
| 114 | K172V |
| 115 | K172P |
| 116 | K172T |
| 117 | K172C |
| 118 | K172N |
| 119 | K172L |
| 120 | R173H |
| 121 | R173Y |
| 122 | R173S |
| 123 | R173W |
| 124 | R173P |
| 125 | R173N |
| 126 | R173Q |
| 127 | K172A + R173A + K387Y |
| 128 | K172A + R173G + K387Y |
| 129 | K172A + DEL173 + K387Y |
| 130 | K172G + R173A + K387Y |
| 131 | K172G + R173G + K387Y |
| 132 | K172G + DEL173 + K387Y |
| 133 | K172A + R173A + K387S |
| 134 | K172A + R173G + K387S |
| 135 | K172A + DEL173 + K387S |
| 136 | K172G + R173A + K387S |
| 137 | K172G + R173G + K387S |
| 138 | K172G + DEL173 + K387S |
| 139 | D130E + DEL172 + K387Y |
| 140 | D130E + DEL172 |
| 141 | K387A |

### Example 2 dsRNA impurity generation in in-vitro transcription

### 2.1 Unmodified NTP

[0089] (1) The enzyme stock solution obtained in Example 1 was diluted with a storage buffer (Vazyme, catalog number: DD4101) to an enzyme activity of 300 U/L. The reaction components (20 L) according to Table 2 were added into an 8-tube strip, mixed uniformly, and centrifuged. The 8-tube strip was placed on a PCR instrument and the reaction was performed at 37° C. for 1 h. Then 36 L of magnetic beads were added, and the resulting mixture was mixed uniformly and then incubated at room temperature for 2 to 5 min. The mixture was placed on a magnetic rack to purify mRNA (Vazyme, catalog number: N412). After purification, the resulting product was transferred to an RNase-free centrifuge tube to obtain the purified mRNA.

[0090] (2) The content of dsRNA impurities was tested using a dsRNA assay kit (Vazyme, catalog number: DD3509).

TABLE 2
Reaction system ratio

| Component | Concentration | | Volume (μL) |
|---|---|---|---|
| ATP | 100 | mM | 2 |
| GTP | 100 | mM | 2 |
| CTP | 100 | mM | 2 |
| UTP | 100 | mM | 2 |
| Murine RNase Inhibitor | 40 | U/μL | 1 |
| (Vazyme, catalog number: DD4102) | | | |
| Pyrophosphatase, Inorganic | 0.1 | U/μL | 1 |
| (Vazyme, catalog number: DD4103) | | | |
| Template DNA | \ | | 1 μg |
| (SEQ ID NO: 283) | | | |
| 10 × Transcription buffer | \ | | 2 |
| (Vazyme, catalog number: DD4101R) | | | |
| T7 RNA polymerase | 300 | U/μL | 1 |

| | | |
|---|---|---|
| ddH₂O | \ | Making up to |
| | | 20 μL |

[0091] The dsRNA assay results are as shown in Table 3. Compared with the WT group, most of the polymerase variants in Example 1 can effectively reduce the generation of dsRNA impurities during in-vitro transcription, wherein the variants in the DEL172-173+Y385A, DEL172-173+D388A, and DEL172-173+D388G groups can reduce the residual dsRNA by 99%.

TABLE 3
dsRNA residue

| Amino acid | Variant | dsRNA residue (%) |
|---|---|---|
| sequence number | (relative to SEQ ID NO: 1) | (relative to WT) |
| 1 | WT | \ |
| 2 | K172A | 49.90 |
| 3 | K172G | 27.93 |
| 4 | Del172 | 32.42 |
| 5 | Del173 | 27.72 |
| 6 | R173C | 40.62 |
| 7 | R173G | 23.80 |
| 8 | K172A + R173A | 18.35 |
| 9 | K172G + R173A | 8.04 |
| 10 | K172A + R173G | 7.42 |
| 11 | K172G + R173G | 8.05 |
| 12 | DEL172-173 | 3.12 |
| 13 | DEL172-173 + Y385A | 0.62 |
| 14 | DEL172-173 + D388A | 0.62 |
| 15 | DEL172-173 + D388G | 0.62 |
| 16 | DEL172-173 + Y385A + F880Y | 3.30 |
| 17 | DEL172-173 + D388G + F880Y | 2.06 |
| 18 | Y178H | 19.18 |
| 19 | Y385A | 45.77 |
| 20 | Y385D | 35.46 |
| 21 | F880A | 2.06 |
| 22 | F880G | 4.54 |
| 23 | F880W | 6.19 |
| 24 | D388A | 116.08 |
| 25 | D388G | 130.72 |
| 26 | N171G | 62.16 |
| 27 | K172E | 12.74 |
| 28 | K172D | 9.90 |
| 29 | R173E | 12.24 |
| 30 | R173D | 3.24 |
| 31 | R173A | 26.60 |
| 32 | K172A + R173G + Y385A | 8.31 |
| 33 | K172A + R173G + D388Y | 8.85 |
| 34 | K172A + R173G + F880Y | 20.00 |
| 35 | K172G + R173G + Y385A | 7.91 |
| 36 | K172G + R173G + D388Y | 5.49 |
| 37 | K172G + R173G + F880Y | 6.56 |
| 38 | DEL172-173 + F880Y | 3.50 |
| 39 | DEL172-173 + Y178H | 4.24 |
| 40 | DEL172-173 + D130E | 3.49 |
| 41 | DEL172 + R173A | 28.25 |
| 42 | DEL172 + R173C | 24.51 |
| 43 | DEL172 + R173G | 19.34 |
| 44 | DEL172 + D130E | 24.27 |
| 45 | DEL172 + K387S | 11.67 |
| 46 | DEL172 + K387Y | 15.11 |
| 47 | DEL172 + F880A | 3.23 |
| 48 | R298A | 32.36 |
| 49 | Y385E | 45.45 |
| 50 | K387Q | 49.26 |
| 51 | K387Y | 87.72 |
| 52 | K387S | 61.35 |
| 53 | D388L | 84.03 |
| 54 | D130E + K172A + R173G + Y178H + D388G | 21.43 |
| 55 | D130E + R173G | 31.82 |
| 56 | D130E + K172G + Y178H + D388G | 62.14 |
| 57 | K172A + R173C + Y178H + D388G | 70.78 |
| 58 | D130E + K172G + R173C + D388Y | 16.84 |
| 59 | D130E + K172G + R173G + Y178H | 4.47 |
| 60 | R173A + Y178H | 53.14 |
| 61 | D130E + K172A + Y178H | 68.49 |
| 62 | D130E + K172A + R173A | 30.45 |
| 63 | D130E + K172G + R173G + D388G | 4.17 |
| 64 | D130E + K172G + R173C + Y178H + D388Y | 17.21 |
| 65 | K172G + D388Y | 15.62 |
| 66 | D130E + K172A | 49.11 |
| 67 | D130E + R173A + D388G | 22.96 |
| 68 | K172A + D388Y | 27.80 |
| 69 | D130E + K172A + R173C + D388G | 49.60 |
| 70 | D130E + R173C | 76.39 |
| 71 | R173A + D388Y | 22.79 |
| 72 | D130E + R173A | 30.85 |
| 73 | D130E + K172A + Y178H + D388Y | 30.65 |
| 74 | D130E + K172A + R173G + Y178H | 12.01 |
| 75 | K172A + Y178H + D388Y | 56.52 |
| 76 | D130E + K172G + D388Y | 49.22 |
| 77 | D130E + K172A + R173C + Y178H + D388Y | 23.64 |
| 78 | D130E + K172G + R173C + Y178H + D388G | 42.53 |
| 79 | D130E + K172A + R173G + D388Y | 20.94 |
| 80 | K172A + R173C + D388Y | 37.36 |
| 81 | K172A + R173A + D388Y | 25.74 |
| 82 | DEL172 + K387G | 21.74 |
| 83 | D130E + R173G + Y178P + K387Y | 20.61 |
| 84 | DEL172-173 + K387G | 2.29 |
| 85 | DEL172-173 + K387Y | 2.51 |
| 86 | DEL172 + R173A + K387S | 18.21 |
| 87 | Del172 + R173G + K387S | 4.99 |
| 88 | K172A + DEL173 | 26.39 |
| 89 | K172G + DEL173 | 17.68 |
| 90 | DEL172 + R298A | 11.61 |
| 91 | DEL173 + R298A | 9.90 |
| 92 | K387S + R298A | 61.35 |
| 93 | K387Y + R298A | 82.64 |
| 94 | Y385A + R298A | 10.17 |
| 95 | D388A + R298A | 33.28 |
| 96 | DEL172 + K387S + R298A | 19.38 |
| 97 | Y385A + K387Y | 60.61 |
| 98 | Y385A + K387S | 18.99 |
| 99 | Y385A + D388G | 68.26 |
| 100 | K387Y + D388A | 50.63 |
| 101 | K387Y + D388G | 78.74 |
| 102 | K387S + D388A | 64.31 |
| 103 | Y385A + K387Y + D388G | 56.34 |
| 104 | Y385A + K387S + D388G | 41.84 |
| 105 | Y385A + K387Y + D388A | 26.14 |
| 106 | Y385A + K387S + D388A | 19.14 |
| 107 | K172H | 61.73 |
| 108 | K172Y | 40.24 |
| 109 | K172S | 36.83 |
| 110 | K172W | 25.87 |
| 111 | K172F | 28.33 |
| 112 | K172I | 30.72 |
| 113 | K172M | 76.63 |
| 114 | K172V | 27.74 |
| 115 | K172P | 7.83 |
| 116 | K172T | 34.48 |
| 117 | K172C | 34.31 |
| 118 | K172N | 32.00 |
| 119 | K172L | 56.82 |
| 120 | R173H | 47.28 |
| 121 | R173Y | 41.32 |
| 122 | R173S | 22.32 |
| 123 | R173W | 34.31 |
| 124 | R173P | 9.03 |
| 125 | R173N | 23.23 |
| 126 | R173Q | 45.45 |
| 127 | K172A + R173A + K387Y | 8.02 |
| 128 | K172A + R173G + K387Y | 7.17 |
| 129 | K172A + Del173 + K387Y | 8.14 |
| 130 | K172G + R173A + K387Y | 7.63 |
| 131 | K172G + R173G + K387Y | 5.41 |
| 132 | K172G + DEL173 + K387Y | 5.70 |
| 133 | K172A + R173A + K387S | 7.54 |
| 134 | K172A + R173G + K387S | 3.98 |
| 135 | K172A + DEL173 + K387S | 10.48 |
| 136 | K172G + R173A + K387S | 4.91 |
| 137 | K172G + R173G + K387S | 2.67 |
| 138 | K172G + DEL173 + K387S | 5.10 |
| 139 | D130E + DEL172 + K387Y | 27.78 |
| 140 | D130E + DEL172 | 24.27 |
| 141 | K387A | 13.30 |

The dsRNA residue (%) refers to the ratio of the residual dsRNA in the variant group to the residual dsRNA in the WT group.

2.2 Modified NTP (ml1A)

[0092] (1) The enzyme stock solutions of RNA polymerase variants DEL172-173+Y385A, DEL172-173+D388A, and DEL172-173+D388G were each diluted with a storage buffer (Vazyme, catalog number: DD4101) to an enzyme activity of 300 U/L. The reaction components (20 μL) according to Table 4 were added into an 8-tube strip, mixed uniformly, and centrifuged. The 8-tube strip was placed on a PCR instrument and the reaction was performed at 37° C. for 1 h. Then 36 μL of magnetic beads were added, and the resulting mixture was mixed uniformly and incubated at room temperature for 2 to 5 min. The mixture was placed on a magnetic rack to purify mRNA (Vazyme, catalog number: N412). After purification, the resulting product was transferred to an RNase-free centrifuge tube to obtain the purified mRNA.

[0093] (2) The content of dsRNA impurities was tested using a dsRNA assay kit (Vazyme, catalog number: DD3509).

TABLE 4
Reaction system ratio

| | | |
|---|---|---|
| Component | Concentration | Volume (μL) |

| | | | |
|---|---|---|---|
| ATP | 100 | mM | 2 |
| GTP | 100 | mM | 2 |
| CTP | 100 | mM | 2 |
| m1ψ | 100 | mM | 2 |
| Murine RNase Inhibitor | 40 | U/μL | 1 |

(Vazyme, catalog number:
DD4102)

| | | | |
|---|---|---|---|
| Pyrophosphatase, Inorganic | 0.1 | U/μL | 1 |

| | | |
|---|---|---|
| (Vazyme, catalog number: | | |
| DD4103) | | |
| Template DNA | \ | 1 μg |
| (SEQ ID NO: 283) | | |
| 10 × Transcription buffer | \ | 2 |
| (Vazyme, catalog number: | | |
| DD4101R) | | |

| | | | |
|---|---|---|---|
| T7 RNA polymerase | 300 | U/μL | 1 |

| | | |
|---|---|---|
| ddH₂O | \ | Making up to |
| | | 20 μL |

[0094] The dsRNA assay results show that the in-vitro transcription reactions involving the RNA polymerase variants DEL172-173+D388A and DEL172-173+D388G can reduce the residual dsRNA percentage (residual dsRNA/total RNA) to 0.0003%; and the in-vitro transcription reaction involving the polymerase variant DEL172-173+Y385A can reduce the residual dsRNA percentage to 0.0001%.

### Example 3 Alignment of Integrity of RNA Products in In-Vitro Transcription

3.1 Unmodified NTP (template of SEQ ID NO: 283)

[0095] (1) The purified mRNA was obtained with reference to step (1) of point 2.1 in Example 2.

[0096] (2) Capillary electrophoresis was performed using a Qsep400 automated nucleic acid analyzer to detect the integrity of the mRNA (intact RNA product/total RNA).

[0097] The detection results are as shown in Table 5-1 and Table 5-2.

### 3.2 Modified NTP (Mlylf, Template of SEQ ID NO: 283)

[0098] (1) The purified mRNA was obtained with reference to step (1) of point 2.2 in Example 2.

[0099] (2) Capillary electrophoresis was performed using a Qsep400 automated nucleic acid analyzer to detect the integrity of the mRNA.

[0100] The detection results are as shown in Table 5-1 and Table 5-2.

TABLE 5-1
Integrity of mRNA products

| | Mutation site | Integrity | Integrity |
|---|---|---|---|
| Sequence No. | (relative to SEQ ID NO: 1) | (unmodified) | (m1ψ) |
| 1 | WT | 83% | 83% |
| 18 | Y178H | 89% | 88% |
| 19 | Y385A | 90.5% | 89.1% |
| 49 | Y385E | 87.70% | 87.40% |
| 50 | K387Q | 88.30% | 86.80% |
| 51 | K387Y | 88.50% | 90.60% |
| 25 | D388G | 91.0% | 89.0% |
| 53 | D388L | 87% | 85% |

TABLE 5-2
Integrity of mRNA products

| Sequence | Mutation site | Increase in integrity |
|---|---|---|
| No. | (relative to SEQ ID NO: 1) | (%) |
| 2 | K172A | 2.00% |
| 3 | K172G | 2.00% |
| 4 | Del172 | 1.70% |
| 5 | Del173 | 2.60% |
| 6 | R173C | 3.00% |
| 7 | R173G | −0.10% |
| 8 | K172A + R173A | 2.00% |
| 9 | K172G + R173A | 1.90% |
| 10 | K172A + R173G | 2.80% |
| 11 | K172G + R173G | 1.80% |
| 12 | DEL172-173 | −3.30% |
| 20 | Y385D | 0.10% |
| 27 | K172E | −0.20% |
| 29 | R173E | 2.30% |
| 30 | R173D | 0.60% |
| 31 | R173A | 0.10% |
| 32 | K172A + R173G + Y385A | −0.10% |
| 34 | K172A + R173G + F880Y | 1.10% |
| 40 | DEL172-173 + D130E | 0.10% |
| 41 | DEL172 + R173A | 3.50% |
| 42 | DEL172 + R173C | 2.10% |
| 43 | DEL172 + R173G | 2.20% |
| 44 | DEL172 + D130E | 0.10% |
| 45 | DEL172 + K387S | 3.60% |
| 52 | K387S | 3.00% |
| 69 | D130E + K172A + R173C + D388G | 1.05% |
| 88 | K172A + DEL173 | 2.400% |
| 89 | K172G + DEL173 | 0.750% |
| 97 | Y385A + K387Y | −0.60% |
| 102 | K387S + D388A | 1.90% |
| 104 | Y385A + K387S + D388G | −0.40% |
| 106 | Y385A + K387S + D388A | −0.35% |
| 112 | K172I | 0.70% |
| 113 | K172M | 2.00% |
| 117 | K172C | −0.30% |
| 118 | K172N | 1.55% |
| 119 | K172L | 0.000% |
| 120 | R173H | 0.000% |
| 122 | R173S | 2.250% |
| 123 | R173W | −0.550% |
| 125 | R173N | 1.850% |
| 127 | K172A + R173A + K387Y | 0.700% |
| 128 | K172A + R173G + K387Y | 1.150% |
| 129 | K172A + DEL173 + K387Y | −0.300% |
| 130 | K172G + R173A + K387Y | 0.550% |
| 131 | K172G + R173G + K387Y | 2.150% |
| 133 | K172A + R173A + K387S | 1.050% |
| 134 | K172A + R173G + K387S | 1.050% |
| 135 | K172A + DEL173 + K387S | 0.450% |
| 136 | K172G + R173A + K387S | −0.250% |
| 137 | K172G + R173G + K387S | 0.200% |
| 138 | K172G + DEL173 + K387S | −0.450% |

The increase in integrity (%) refers to the difference between the proportion of intact mRNA (to total RNA product) in the variant group and the proportion of intact mRNA in the WT group.

3.3 saRNA template I (template of SEQ ID NO: 284)

[0101] (1) The enzyme stock solution of the RNA polymerase variant K387Y was diluted with a storage buffer (Vazyme, catalog number: DD4101) to an enzyme activity of 300 U/L. In-vitro transcription was performed according to the reaction system in Table 2 to obtain the purified mRNA.

[0102] (2) Capillary electrophoresis was performed using a Qsep400 automated nucleic acid analyzer to detect the integrity of the saRNA product.

[0103] The detection results show that the integrity of the transcription product is only 56.4% in the in-vitro transcription reaction using the wild-type T7 RNA polymerase (WT), while the integrity of the saRNA product can be increased to 73.1% using the K387Y variant.

3.4 saRNA Template II (>10000 nt)

[0104] (1) The enzyme stock solutions of the RNA polymerase variants K387A and DEL172+K387Y were each diluted with a storage buffer (Vazyme, catalog number: DD4101) to an enzyme activity of 300 U/L. In-vitro transcription was performed according to the reaction system in Table 6 to obtain the purified mRNA.

TABLE 6
Reaction system

| Component | Concentration | | Volume (μL) |
|---|---|---|---|
| ATP | 100 | mM | 1.5 |
| GTP | 100 | mM | 1.5 |
| CTP | 100 | mM | 1.5 |
| UTP | 100 | mM | 1.5 |
| Murine RNase Inhibitor | 40 | U/μL | 2 |
| (Vazyme, catalog number: | | | |
| DD4102) | | | |
| Pyrophosphatase, Inorganic | 0.1 | U/μL | 1 |
| (Vazyme, catalog number: | | | |
| DD4103) | | | |
| Template DNA | 0.5 | μg/μL | 1 |
| (SEQ ID NO: 286) | | | |
| CleanCap AG | 100 | mM | 0.3 |
| (Trilink, catalog number: | | | |
| N-7113) | | | |
| pH 6.8, HEPES buffer | \ | | 2 |
| (containing 25 mM TCEP, 20 mM | | | |
| spermidine) | | | |
| T7 RNA | 300 | U/μL | 1 |
| polymerase | | | |
| MgCl₂ | 200 | mM | 2 |

| | | |
|---|---|---|
| ddH2O | \ | Making up to |
| | | 20 μL |

[0105] (2) Capillary electrophoresis was performed using a Qsep400 automated nucleic acid analyzer to detect the integrity of the saRNA product.

[0106] The detection results show that the variants in the K387A group and the DEL172+K387Y group can increase the integrity of the saRNA product by 3.1% and 4.9%, respectively, relative to the saRNA product obtained using the polymerase in the WT group.

### Example 4 Preparation of Capped RNA by In-Vitro Transcription

[0107] (1) The enzyme stock solutions of the variants K387Y and DEL172+K387S were each diluted with a storage buffer (Vazyme, catalog number: DD4101) to an enzyme activity of 300 U/μL. The reaction system (20 μL) according to Table 7 was prepared into a MIX solution in an EP tube. The MIX solution was sub-packaged into an 8-tube strip, mixed uniformly, and centrifuged. The 8-tube strip was placed on a PCR instrument and the reaction was performed at 37° C. for 1 h. Then 36 L of magnetic beads were added, and the resulting mixture was mixed uniformly and then incubated at room temperature for 2 to 5 min. The mixture was placed on a magnetic rack to purify mRNA (Vazyme, catalog number: N412). After purification, the resulting product was transferred to an RNase-free centrifuge tube to obtain the purified mRNA.

TABLE 7
Reaction system

| | | |
|---|---|---|
| Component | Concentration | Volume (μL) |

| | | | |
|---|---|---|---|
| ATP | 100 | mM | 2 |
| GTP | 100 | mM | 2 |
| CTP | 100 | mM | 2 |
| UTP | 100 | mM | 2 |
| Murine RNase Inhibitor | 40 | U/μL | 1 |

(Vazyme, catalog number:
DD4102)

| | | | |
|---|---|---|---|
| Pyrophosphatase, Inorganic | 0.1 | U/μL | 1 |

(Vazyme, catalog number:
DD4103)

| | | | |
|---|---|---|---|
| CleanCap AG | 100 | mM | 1 |

| | | |
|---|---|---|
| (Trilink, catalog number: | | |
| N-7113) | | |
| Template DNA | \ | 1 μg |
| (SEQ ID NO: 285) | | |
| 10 × Transcription buffer | \ | 2 |
| (Vazyme, catalog number: | | |
| DD4101R) | | |

| | | | |
|---|---|---|---|
| T7 RNA polymerase | 300 | U/μL | 1 |

| | | |
|---|---|---|
| ddH2O | \ | Making up to |
| | | 20 μL |

(2) Capping rate detection:

[0108] \textcircled{1} The purified mRNA obtained in step (1) bound to a probe, with the reaction system as shown in Table 8 and the reaction conditions as shown in Table 9.

TABLE 8
Reaction system

| Component | Volume | |
|---|---|---|
| mRNA | V (25 pmol) | |
| RNase-free H₂O | (20-V) | μL |
| Probe (50 μM) (customized by GenScript) | 1 | μL |
| Total system | 21 | μL |

TABLE 9
Reaction conditions:

| Temperature | Time |
|---|---|
| 95° C. | 2 min |
| 70° C. to 16° C. | −0.1° C./s, ≈180 cycles |
| 16° C. | ∞ |

[0109] \textcircled{2} RNase H cleavage: the enzyme cleavage reaction system (Thermo Scientific, catalog number: EN0201) was prepared according to Table 10, mixed uniformly by complete vortex shaking, placed in a PCR instrument, and reacted at 25° C. for 20 min.

TABLE 10
Reaction system

| Component | 25 pmol volume | |
|---|---|---|
| Product from the previous step | 21 | μL |
| RNase H Reaction Buffer (10×) | 3 | μL |
| RNase H (5 U/μl) | 3 | μL |
| RNase-free H₂O | 3 | μL |
| Total system | 30 | μL |

[0110] \textcircled{3} SA magnetic bead binding:

[0111] A. Cleaning of magnetic beads: 9 μL of SA magnetic beads were taken and added into a centrifuge tube, and the centrifuge tube was placed on a magnetic rack. After the solution became clear, the supernatant was aspirated and discarded using a pipettor. The centrifuge tube was removed from the magnetic rack. 200 μL of RNase-free H₂O was added for rinsing. The centrifuge tube was then placed on the magnetic rack. After the solution became clear, the supernatant was aspirated and discarded using a pipettor. Then 200 μL of RNase-free H₂O was added for rinsing again.

[0112] B. Reaction conditions: The centrifuge tube was removed from the magnetic rack, and the enzyme cleavage product was added to the SA magnetic beads. The resulting mixture was completely and uniformly mixed by pipetting 20-30 times using a pipettor, and then subjected to tumbling incubation at room temperature on a tumbling instrument for 30 min, so that the magnetic beads fully bound to the enzyme cleavage product.

[0113] \textcircled{4} Rinsing and elution:

[0114] A. The product from step 0 was placed on a magnetic rack for 2 to 3 min, and after the solution became clear, the supernatant was aspirated and discarded using a pipettor;

[0115] B. 200 μL of a rinsing liquid was added for rinsing (taking care to avoid pipetting the magnetic beads), the resulting mixture was left to stand for 0.5 to 1 min, and the supernatant was aspirated and discarded using a pipettor;

[0116] C. Step B was repeated;

[0117] D. The centrifuge tube was removed from the magnetic rack, 30 μL of an eluent was added, and the resulting mixture was uniformly mixed by pipetting 10-20 times using a pipettor, so that the magnetic beads were dispersed uniformly and fully eluted;

[0118] E. The eluted magnetic beads were placed in a PCR instrument, reacted at 85° C. for 3 min, and then immediately placed on the magnetic rack, and after the solution became clear (0.5 to 1 min), the supernatant was pipetted and transferred to a new centrifuge tube, that is, the supernatant was the desired product;

[0119] F. The capping rate of the product from step E was detected by capillary electrophoresis, and the capping rate was calculated according to the following formula:

[0120] Cap1 capping rate %=[Cap1 peak area/(Uncap peak area+Cap1 peak area)]×100%.

[0121] The detection results show that in the co-transcriptional capping reaction, the capping rate of the mRNA product in the WT (wild-type T7 RNA polymerase) group is only 87.2%, while the variant in the K387Y group can increase the capping rate of the mRNA product to 91.3%, and the variant in the DEL172+K387S group can increase the capping rate to 100%.

1. An RNA polymerase variant, having an amino acid sequence comprising, relative to SEQ ID NO: 1, one, two, three, four or five amino acid mutations at positions selected from D130, N171, K172, R173, Y178, R298, Y385, K387, D388 or F880, wherein the mutation type is a substitution or deletion, and the amino acid sequence of the variant has at least 97%, at least 98% or at least 99% sequence identity to SEQ ID NO: 1.

2. The variant according to claim 1, wherein the amino acid sequence of the variant has, relative to SEQ ID NO: 1, one amino acid mutation, and the position of the amino acid mutation is selected from N171, K172, R173, Y178, R298, Y385, K387, D388 or F880.

3. The variant according to claim 1, wherein the amino acid sequence of the variant comprises, relative to SEQ ID NO: 1,
(1) a mutation at position K172, and also any one, two, three or four amino acid mutations at positions selected from D130, R173, Y178, R298, Y385, K387, D388 or F880, wherein the mutation type is a substitution or deletion; or
(2) a mutation at position K173, and also any one, two or three amino acid mutations at positions selected from D130, Y178, R298, K387 or D388, wherein the mutation type is a substitution or deletion; or
(3) any two or three amino acid mutations at positions selected from R298, Y385, K387 or D388, wherein the mutation type is a substitution.

4. The variant according to claim 3, wherein the variant comprises a mutation combination selected from any one of: K172+R173, D130+K172, K172+K387, K172+F880, K172+D388, K172+R298, D130+R173, R173+Y178, R173+D388, R173+R298, K387+R298, Y385+R298, D388+R298, Y385+K387, Y385+D388, 4872-1050-8785, v. 2 K387+D388, K172+R173+Y385, K172+R173+D388, K172+R173+K387, K172+R173+F880, K172+R173+Y178, D130+K172+R173, D130+K172+Y178, D130+K172+K387, D130+R173+D388, K172+Y178+D388, D130+K172+D388, K172+K387+R298, Y385+K387+D388, K172+R173+Y385+F880, K172+R173+D388+F880, K172+R173+Y178+D388, D130+K172+R173+D388, D130+K172+R173+Y178, D130+R173+Y178+K387, D130+K172+Y178+D388, or D130+K172+R173+Y178+D388.

5. The variant according to claim 2, wherein
1) the mutation type at position N171 is N171G;
2) the mutation type at position K172 is selected from DEL172, K172A, K172G, K172E, K172D, K172H, K172Y, K172S, K172W, K172P, K1721, K172M, K172V, K172F, K172T, K172C, K172N or K172L;
3) the mutation type at position R173 is selected from DEL173, R173A, R173C, R173G, R173E, R173D, R173H, R173Y, R173S, R173W, R173P, R173N or R173Q;
4) the mutation type at position Y178 is Y178H;
5) the mutation type at position R298 is R298A;
6) the mutation type at position Y385 is selected from Y385A, Y385D or Y385E;
7) the mutation type at position K387 is selected from K387Q, K387Y, K387S or K387A;
8) the mutation type at position D388 is selected from D388A, D388G or D388L; and
9) the mutation type at position F880 is selected from F880A, F880G or F880W.

6. The variant according to claim 4, wherein
1) the mutation type at position D130 is D130E;
2) the mutation type at position K172 may be selected from DEL172, K172A or K172G;
3) the mutation type at position R173 may be selected from DEL173, R173A, R173G or R173C;
4) the mutation type at position Y178 may be selected from Y178H or Y178P;
5) the mutation type at position R298 is R298A;
6) the mutation type at position Y385 is Y385A;
7) the mutation type at position K387 may be selected from K387S, K387Y or K387G;
8) the mutation type at position D388 may be selected from D388Y, D388A or D388G; and
9) the mutation type at position F880 may be selected from F880A or F880Y.

7. The variant according to claim 1, wherein the amino acid sequence of the variant is set forth in any one of SEQ ID NOs: 2-141.

8. A nucleotide sequence encoding the variant according to claim 1.

9. A method for preparing an RNA polymerase variant, comprising generating at least one RNA polymerase variant having an amino acid sequence comprising, relative to SEQ ID NO: 1, one, two, three, four or five amino acid mutations at positions selected from D130, N171, K172, R173, Y178, R298, Y385, K387, D388 or F880, wherein the mutation type is a substitution or deletion, and the amino acid sequence of the variant has at least 97%, at least 98% or at least 99% sequence identity to SEQ ID NO: 1 in a host cell, wherein the host cell contains an expression vector carrying a nucleotide sequence encoding the RNA polymerase variant.

10. A method for reducing the generation of dsRNA impurities during the preparation of RNA by in-vitro transcription, comprising bringing a DNA template into contact with the variant according to claim 1, and performing incubation in an in-vitro transcription system.

11. (canceled)

12. A method for generating RNA by in-vitro transcription, comprising bringing a DNA template into contact with at least one variant according to claim 1, and performing incubation in an in-vitro transcription system.

13. A method for generating capped RNA by in-vitro transcription, comprising bringing a DNA template into contact with at least one variant according to claim 1 and a cap analog, and performing incubation in an in-vitro transcription reaction system.

14. A composition or kit, comprising at least one RNA polymerase variant according to claim 1 and at least one buffer component.

The application's sequence listing, which the Patent Office published only in electronic form, follows.

SEQUENCE LISTING (286 sequences)

SEQ ID NO: 1 - protein, 883 aa, synthetic construct
MNTINIAKNDFSDIELAAIPFNTLADHYGERLAREQLALEHESYEMGEARFRKMFERQLKAGEVADNAAAKPLITTLLPKMIARINDWFEEVKAKRGKRPTAFQFLQEIKPEAVAYITIKTTLACLTSADNTTVQAVASAIGRAIEDEARFGRIRDLEAKHFKKNVEEQLNKRVGHVYKKAFMQVVEADMLSKGLLGGEAWSSWHKEDSIHVGVRCIEMLIESTGMVSLHRQNAGVVGQDSETIELAPEYAEAIATRAGALAGISPMFQPCVVPPKPWTGITGGGYWANGRRPLALVRTHSKKALMRYEDVYMPEVYKAINIAQNTAWKINKKVLAVANVITKWKHCPVEDIPAIEREELPMKPEDIDMNPEALTAWKRAAAAVYRKDKARKSRRISLEFMLEQANKFANHKAIWFPYNMDWRGRVYAVSMFNPQGNDMTKGLLTLAKGKPIGKEGYYWLKIHGANCAGVDKVPFPERIKFIEENHENIMACAKSPLENTWWAEQDSPFCFLAFCFEYAGVQHHGLSYNCSLPLAFDGSCSGIQHFSAMLRDEVGGRAVNLLPSETVQDIYGIVAKKVNEILQADAINGTDNEVVTVTDENTGEISEKVKLGTKALAGQWLAYGVTRSVTKRSVMTLAYGSKEFGFRQQVLEDTIQPAIDSGKGLMFTQPNQAAGYMAKLIWESVSVTVVAAVEAMNWLKSAAKLLAAEVKDKKTGEILRKRCAVHWVTPDGFPVWQEYKKPIQTRLNLMFLGQFRLQPTINTNKDSEIDAHKQESGIAPNFVHSQDGSHLRKTVVWAHEKYGIESFALIHDSFGTIPADAANLFKAVRETMVDTYESCDVLADFYDQFADQLHESQLDKMPALPAKGNLNLRDILESDFAFA

SEQ ID NO: 2 - protein, 883 aa, synthetic construct
MNTINIAKNDFSDIELAAIPFNTLADHYGERLAREQLALEHESYEMGEARFRKMFERQLKAGEVADNAAAKPLITTLLPKMIARINDWFEEVKAKRGKRPTAFQFLQEIKPEAVAYITIKTTLACLTSADNTTVQAVASAIGRAIEDEARFGRIRDLEAKHFKKNVEEQLNARVGHVYKKAFMQVVEADMLSKGLLGGEAWSSWHKEDSIHVGVRCIEMLIESTGMVSLHRQNAGVVGQDSETIELAPEYAEAIATRAGALAGISPMFQPCVVPPKPWTGITGGGYWANGRRPLALVRTHSKKALMRYEDVYMPEVYKAINIAQNTAWKINKKVLAVANVITKWKHCPVEDIPAIEREELPMKPEDIDMNPEALTAWKRAAAAVYRKDKARKSRRISLEFMLEQANKFANHKAIWFPYNMDWRGRVYAVSMFNPQGNDMTKGLLTLAKGKPIGKEGYYWLKIHGANCAGVDKVPFPERIKFIEENHENIMACAKSPLENTWWAEQDSPFCFLAFCFEYAGVQHHGLSYNCSLPLAFDGSCSGIQHFSAMLRDEVGGRAVNLLPSETVQDIYGIVAKKVNEILQADAINGTDNEVVTVTDENTGEISEKVKLGTKALAGQWLAYGVTRSVTKRSVMTLAYGSKEFGFRQQVLEDTIQPAIDSGKGLMFTQPNQAAGYMAKLIWESVSVTVVAAVEAMNWLKSAAKLLAAEVKDKKTGEILRKRCAVHWVTPDGFPVWQEYKKPIQTRLNLMFLGQFRLQPTINTNKDSEIDAHKQESGIAPNFVHSQDGSHLRKTVVWAHEKYGIESFALIHDSFGTIPADAANLFKAVRETMVDTYESCDVLADFYDQFADQLHESQLDKMPALPAKGNLNLRDILESDFAFA

SEQ ID NO: 3 - protein, 883 aa, synthetic construct
MNTINIAKNDFSDIELAAIPFNTLADHYGERLAREQLALEHESYEMGEARFRKMFERQLKAGEVADNAAAKPLITTLLPKMIARINDWFEEVKAKRGKRPTAFQFLQEIKPEAVAYITIKTTLACLTSADNTTVQAVASAIGRAIEDEARFGRIRDLEAKHFKKNVEEQLNGRVGHVYKKAFMQVVEADMLSKGLLGGEAWSSWHKEDSIHVGVRCIEMLIESTGMVSLHRQNAGVVGQDSETIELAPEYAEAIATRAGALAGISPMFQPCVVPPKPWTGITGGGYWANGRRPLALVRTHSKKALMRYEDVYMPEVYKAINIAQNTAWKINKKVLAVANVITKWKHCPVEDIPAIEREELPMKPEDIDMNPEALTAWKRAAAAVYRKDKARKSRRISLEFMLEQANKFANHKAIWFPYNMDWRGRVYAVSMFNPQGNDMTKGLLTLAKGKPIGKEGYYWLKIHGANCAGVDKVPFPERIKFIEENHENIMACAKSPLENTWWAEQDSPFCFLAFCFEYAGVQHHGLSYNCSLPLAFDGSCSGIQHFSAMLRDEVGGRAVNLLPSETVQDIYGIVAKKVNEILQADAINGTDNEVVTVTDENTGEISEKVKLGTKALAGQWLAYGVTRSVTKRSVMTLAYGSKEFGFRQQVLEDTIQPAIDSGKGLMFTQPNQAAGYMAKLIWESVSVTVVAAVEAMNWLKSAAKLLAAEVKDKKTGEILRKRCAVHWVTPDGFPVWQEYKKPIQTRLNLMFLGQFRLQPTINTNKDSEIDAHKQESGIAPNFVHSQDGSHLRKTVVWAHEKYGIESFALIHDSFGTIPADAANLFKAVRETMVDTYESCDVLADFYDQFADQLHESQLDKMPALPAKGNLNLRDILESDFAFA

SEQ ID NO: 4 - protein, 882 aa, synthetic construct
MNTINIAKNDFSDIELAAIPFNTLADHYGERLAREQLALEHESYEMGEARFRKMFERQLKAGEVADNAAAKPLITTLLPKMIARINDWFEEVKAKRGKRPTAFQFLQEIKPEAVAYITIKTTLACLTSADNTTVQAVASAIGRAIEDEARFGRIRDLEAKHFKKNVEEQLNRVGHVYKKAFMQVVEADMLSKGLLGGEAWSSWHKEDSIHVGVRCIEMLIESTGMVSLHRQNAGVVGQDSETIELAPEYAEAIATRAGALAGISPMFQPCVVPPKPWTGITGGGYWANGRRPLALVRTHSKKALMRYEDVYMPEVYKAINIAQNTAWKINKKVLAVANVITKWKHCPVEDIPAIEREELPMKPEDIDMNPEALTAWKRAAAAVYRKDKARKSRRISLEFMLEQANKFANHKAIWFPYNMDWRGRVYAVSMFNPQGNDMTKGLLTLAKGKPIGKEGYYWLKIHGANCAGVDKVPFPERIKFIEENHENIMACAKSPLENTWWAEQDSPFCFLAFCFEYAGVQHHGLSYNCSLPLAFDGSCSGIQHFSAMLRDEVGGRAVNLLPSETVQDIYGIVAKKVNEILQADAINGTDNEVVTVTDENTGEISEKVKLGTKALAGQWLAYGVTRSVTKRSVMTLAYGSKEFGFRQQVLEDTIQPAIDSGKGLMFTQPNQAAGYMAKLIWESVSVTVVAAVEAMNWLKSAAKLLAAEVKDKKTGEILRKRCAVHWVTPDGFPVWQEYKKPIQTRLNLMFLGQFRLQPTINTNKDSEIDAHKQESGIAPNFVHSQDGSHLRKTVVWAHEKYGIESFALIHDSFGTIPADAANLFKAVRETMVDTYESCDVLADFYDQFADQLHESQLDKMPALPAKGNLNLRDILESDFAFA

SEQ ID NO: 5 - protein, 882 aa, synthetic construct
MNTINIAKNDFSDIELAAIPFNTLADHYGERLAREQLALEHESYEMGEARFRKMFERQLKAGEVADNAAAKPLITTLLPKMIARINDWFEEVKAKRGKRPTAFQFLQEIKPEAVAYITIKTTLACLTSADNTTVQAVASAIGRAIEDEARFGRIRDLEAKHFKKNVEEQLNKVGHVYKKAFMQVVEADMLSKGLLGGEAWSSWHKEDSIHVGVRCIEMLIESTGMVSLHRQNAGVVGQDSETIELAPEYAEAIATRAGALAGISPMFQPCVVPPKPWTGITGGGYWANGRRPLALVRTHSKKALMRYEDVYMPEVYKAINIAQNTAWKINKKVLAVANVITKWKHCPVEDIPAIEREELPMKPEDIDMNPEALTAWKRAAAAVYRKDKARKSRRISLEFMLEQANKFANHKAIWFPYNMDWRGRVYAVSMFNPQGNDMTKGLLTLAKGKPIGKEGYYWLKIHGANCAGVDKVPFPERIKFIEENHENIMACAKSPLENTWWAEQDSPFCFLAFCFEYAGVQHHGLSYNCSLPLAFDGSCSGIQHFSAMLRDEVGGRAVNLLPSETVQDIYGIVAKKVNEILQADAINGTDNEVVTVTDENTGEISEKVKLGTKALAGQWLAYGVTRSVTKRSVMTLAYGSKEFGFRQQVLEDTIQPAIDSGKGLMFTQPNQAAGYMAKLIWESVSVTVVAAVEAMNWLKSAAKLLAAEVKDKKTGEILRKRCAVHWVTPDGFPVWQEYKKPIQTRLNLMFLGQFRLQPTINTNKDSEIDAHKQESGIAPNFVHSQDGSHLRKTVVWAHEKYGIESFALIHDSFGTIPADAANLFKAVRETMVDTYESCDVLADFYDQFADQLHESQLDKMPALPAKGNLNLRDILESDFAFA

SEQ ID NO: 6 - protein, 883 aa, synthetic construct
MNTINIAKNDFSDIELAAIPFNTLADHYGERLAREQLALEHESYEMGEARFRKMFERQLKAGEVADNAAAKPLITTLLPKMIARINDWFEEVKAKRGKRPTAFQFLQEIKPEAVAYITIKTTLACLTSADNTTVQAVASAIGRAIEDEARFGRIRDLEAKHFKKNVEEQLNKCVGHVYKKAFMQVVEADMLSKGLLGGEAWSSWHKEDSIHVGVRCIEMLIESTGMVSLHRQNAGVVGQDSETIELAPEYAEAIATRAGALAGISPMFQPCVVPPKPWTGITGGGYWANGRRPLALVRTHSKKALMRYEDVYMPEVYKAINIAQNTAWKINKKVLAVANVITKWKHCPVEDIPAIEREELPMKPEDIDMNPEALTAWKRAAAAVYRKDKARKSRRISLEFMLEQANKFANHKAIWFPYNMDWRGRVYAVSMFNPQGNDMTKGLLTLAKGKPIGKEGYYWLKIHGANCAGVDKVPFPERIKFIEENHENIMACAKSPLENTWWAEQDSPFCFLAFCFEYAGVQHHGLSYNCSLPLAFDGSCSGIQHFSAMLRDEVGGRAVNLLPSETVQDIYGIVAKKVNEILQADAINGTDNEVVTVTDENTGEISEKVKLGTKALAGQWLAYGVTRSVTKRSVMTLAYGSKEFGFRQQVLEDTIQPAIDSGKGLMFTQPNQAAGYMAKLIWESVSVTVVAAVEAMNWLKSAAKLLAAEVKDKKTGEILRKRCAVHWVTPDGFPVWQEYKKPIQTRLNLMFLGQFRLQPTINTNKDSEIDAHKQESGIAPNFVHSQDGSHLRKTVVWAHEKYGIESFALIHDSFGTIPADAANLFKAVRETMVDTYESCDVLADFYDQFADQLHESQLDKMPALPAKGNLNLRDILESDFAFA

SEQ ID NO: 7 - protein, 883 aa, synthetic construct
MNTINIAKNDFSDIELAAIPFNTLADHYGERLAREQLALEHESYEMGEARFRKMFERQLKAGEVADNAAAKPLITTLLPKMIARINDWFEEVKAKRGKRPTAFQFLQEIKPEAVAYITIKTTLACLTSADNTTVQAVASAIGRAIEDEARFGRIRDLEAKHFKKNVEEQLNKGVGHVYKKAFMQVVEADMLSKGLLGGEAWSSWHKEDSIHVGVRCIEMLIESTGMVSLHRQNAGVVGQDSETIELAPEYAEAIATRAGALAGISPMFQPCVVPPKPWTGITGGGYWANGRRPLALVRTHSKKALMRYEDVYMPEVYKAINIAQNTAWKINKKVLAVANVITKWKHCPVEDIPAIEREELPMKPEDIDMNPEALTAWKRAAAAVYRKDKARKSRRISLEFMLEQANKFANHKAIWFPYNMDWRGRVYAVSMFNPQGNDMTKGLLTLAKGKPIGKEGYYWLKIHGANCAGVDKVPFPERIKFIEENHENIMACAKSPLENTWWAEQDSPFCFLAFCFEYAGVQHHGLSYNCSLPLAFDGSCSGIQHFSAMLRDEVGGRAVNLLPSETVQDIYGIVAKKVNEILQADAINGTDNEVVTVTDENTGEISEKVKLGTKALAGQWLAYGVTRSVTKRSVMTLAYGSKEFGFRQQVLEDTIQPAIDSGKGLMFTQPNQAAGYMAKLIWESVSVTVVAAVEAMNWLKSAAKLLAAEVKDKKTGEILRKRCAVHWVTPDGFPVWQEYKKPIQTRLNLMFLGQFRLQPTINTNKDSEIDAHKQESGIAPNFVHSQDGSHLRKTVVWAHEKYGIESFALIHDSFGTIPADAANLFKAVRETMVDTYESCDVLADFYDQFADQLHESQLDKMPALPAKGNLNLRDILESDFAFA

SEQ ID NO: 8 - protein, 883 aa, synthetic construct
MNTINIAKNDFSDIELAAIPFNTLADHYGERLAREQLALEHESYEMGEARFRKMFERQLKAGEVADNAAAKPLITTLLPKMIARINDWFEEVKAKRGKRPTAFQFLQEIKPEAVAYITIKTTLACLTSADNTTVQAVASAIGRAIEDEARFGRIRDLEAKHFKKNVEEQLNAAVGHVYKKAFMQVVEADMLSKGLLGGEAWSSWHKEDSIHVGVRCIEMLIESTGMVSLHRQNAGVVGQDSETIELAPEYAEAIATRAGALAGISPMFQPCVVPPKPWTGITGGGYWANGRRPLALVRTHSKKALMRYEDVYMPEVYKAINIAQNTAWKINKKVLAVANVITKWKHCPVEDIPAIEREELPMKPEDIDMNPEALTAWKRAAAAVYRKDKARKSRRISLEFMLEQANKFANHKAIWFPYNMDWRGRVYAVSMFNPQGNDMTKGLLTLAKGKPIGKEGYYWLKIHGANCAGVDKVPFPERIKFIEENHENIMACAKSPLENTWWAEQDSPFCFLAFCFEYAGVQHHGLSYNCSLPLAFDGSCSGIQHFSAMLRDEVGGRAVNLLPSETVQDIYGIVAKKVNEILQADAINGTDNEVVTVTDENTGEISEKVKLGTKALAGQWLAYGVTRSVTKRSVMTLAYGSKEFGFRQQVLEDTIQPAIDSGKGLMFTQPNQAAGYMAKLIWESVSVTVVAAVEAMNWLKSAAKLLAAEVKDKKTGEILRKRCAVHWVTPDGFPVWQEYKKPIQTRLNLMFLGQFRLQPTINTNKDSEIDAHKQESGIAPNFVHSQDGSHLRKTVVWAHEKYGIESFALIHDSFGTIPADAANLFKAVRETMVDTYESCDVLADFYDQFADQLHESQLDKMPALPAKGNLNLRDILESDFAFA

SEQ ID NO: 9 - protein, 883 aa, synthetic construct
MNTINIAKNDFSDIELAAIPFNTLADHYGERLAREQLALEHESYEMGEARFRKMFERQLKAGEVADNAAAKPLITTLLPKMIARINDWFEEVKAKRGKRPTAFQFLQEIKPEAVAYITIKTTLACLTSADNTTVQAVASAIGRAIEDEARFGRIRDLEAKHFKKNVEEQLNGAVGHVYKKAFMQVVEADMLSKGLLGGEAWSSWHKEDSIHVGVRCIEMLIESTGMVSLHRQNAGVVGQDSETIELAPEYAEAIATRAGALAGISPMFQPCVVPPKPWTGITGGGYWANGRRPLALVRTHSKKALMRYEDVYMPEVYKAINIAQNTAWKINKKVLAVANVITKWKHCPVEDIPAIEREELPMKPEDIDMNPEALTAWKRAAAAVYRKDKARKSRRISLEFMLEQANKFANHKAIWFPYNMDWRGRVYAVSMFNPQGNDMTKGLLTLAKGKPIGKEGYYWLKIHGANCAGVDKVPFPERIKFIEENHENIMACAKSPLENTWWAEQDSPFCFLAFCFEYAGVQHHGLSYNCSLPLAFDGSCSGIQHFSAMLRDEVGGRAVNLLPSETVQDIYGIVAKKVNEILQADAINGTDNEVVTVTDENTGEISEKVKLGTKALAGQWLAYGVTRSVTKRSVMTLAYGSKEFGFRQQVLEDTIQPAIDSGKGLMFTQPNQAAGYMAKLIWESVSVTVVAAVEAMNWLKSAAKLLAAEVKDKKTGEILRKRCAVHWVTPDGFPVWQEYKKPIQTRLNLMFLGQFRLQPTINTNKDSEIDAHKQESGIAPNFVHSQDGSHLRKTVVWAHEKYGIESFALIHDSFGTIPADAANLFKAVRETMVDTYESCDVLADFYDQFADQLHESQLDKMPALPAKGNLNLRDILESDFAFA

SEQ ID NO: 10 - protein, 883 aa, synthetic construct
MNTINIAKNDFSDIELAAIPFNTLADHYGERLAREQLALEHESYEMGEARFRKMFERQLKAGEVADNAAAKPLITTLLPKMIARINDWFEEVKAKRGKRPTAFQFLQEIKPEAVAYITIKTTLACLTSADNTTVQAVASAIGRAIEDEARFGRIRDLEAKHFKKNVEEQLNAGVGHVYKKAFMQVVEADMLSKGLLGGEAWSSWHKEDSIHVGVRCIEMLIESTGMVSLHRQNAGVVGQDSETIELAPEYAEAIATRAGALAGISPMFQPCVVPPKPWTGITGGGYWANGRRPLALVRTHSKKALMRYEDVYMPEVYKAINIAQNTAWKINKKVLAVANVITKWKHCPVEDIPAIEREELPMKPEDIDMNPEALTAWKRAAAAVYRKDKARKSRRISLEFMLEQANKFANHKAIWFPYNMDWRGRVYAVSMFNPQGNDMTKGLLTLAKGKPIGKEGYYWLKIHGANCAGVDKVPFPERIKFIEENHENIMACAKSPLENTWWAEQDSPFCFLAFCFEYAGVQHHGLSYNCSLPLAFDGSCSGIQHFSAMLRDEVGGRAVNLLPSETVQDIYGIVAKKVNEILQADAINGTDNEVVTVTDENTGEISEKVKLGTKALAGQWLAYGVTRSVTKRSVMTLAYGSKEFGFRQQVLEDTIQPAIDSGKGLMFTQPNQAAGYMAKLIWESVSVTVVAAVEAMNWLKSAAKLLAAEVKDKKTGEILRKRCAVHWVTPDGFPVWQEYKKPIQTRLNLMFLGQFRLQPTINTNKDSEIDAHKQESGIAPNFVHSQDGSHLRKTVVWAHEKYGIESFALIHDSFGTIPADAANLFKAVRETMVDTYESCDVLADFYDQFADQLHESQLDKMPALPAKGNLNLRDILESDFAFA

SEQ ID NO: 11 - protein, 883 aa, synthetic construct
MNTINIAKNDFSDIELAAIPFNTLADHYGERLAREQLALEHESYEMGEARFRKMFERQLKAGEVADNAAAKPLITTLLPKMIARINDWFEEVKAKRGKRPTAFQFLQEIKPEAVAYITIKTTLACLTSADNTTVQAVASAIGRAIEDEARFGRIRDLEAKHFKKNVEEQLNGGVGHVYKKAFMQVVEADMLSKGLLGGEAWSSWHKEDSIHVGVRCIEMLIESTGMVSLHRQNAGVVGQDSETIELAPEYAEAIATRAGALAGISPMFQPCVVPPKPWTGITGGGYWANGRRPLALVRTHSKKALMRYEDVYMPEVYKAINIAQNTAWKINKKVLAVANVITKWKHCPVEDIPAIEREELPMKPEDIDMNPEALTAWKRAAAAVYRKDKARKSRRISLEFMLEQANKFANHKAIWFPYNMDWRGRVYAVSMFNPQGNDMTKGLLTLAKGKPIGKEGYYWLKIHGANCAGVDKVPFPERIKFIEENHENIMACAKSPLENTWWAEQDSPFCFLAFCFEYAGVQHHGLSYNCSLPLAFDGSCSGIQHFSAMLRDEVGGRAVNLLPSETVQDIYGIVAKKVNEILQADAINGTDNEVVTVTDENTGEISEKVKLGTKALAGQWLAYGVTRSVTKRSVMTLAYGSKEFGFRQQVLEDTIQPAIDSGKGLMFTQPNQAAGYMAKLIWESVSVTVVAAVEAMNWLKSAAKLLAAEVKDKKTGEILRKRCAVHWVTPDGFPVWQEYKKPIQTRLNLMFLGQFRLQPTINTNKDSEIDAHKQESGIAPNFVHSQDGSHLRKTVVWAHEKYGIESFALIHDSFGTIPADAANLFKAVRETMVDTYESCDVLADFYDQFADQLHESQLDKMPALPAKGNLNLRDILESDFAFA

SEQ ID NO: 12 - protein, 881 aa, synthetic construct
MNTINIAKNDFSDIELAAIPFNTLADHYGERLAREQLALEHESYEMGEARFRKMFERQLKAGEVADNAAAKPLITTLLPKMIARINDWFEEVKAKRGKRPTAFQFLQEIKPEAVAYITIKTTLACLTSADNTTVQAVASAIGRAIEDEARFGRIRDLEAKHFKKNVEEQLNVGHVYKKAFMQVVEADMLSKGLLGGEAWSSWHKEDSIHVGVRCIEMLIESTGMVSLHRQNAGVVGQDSETIELAPEYAEAIATRAGALAGISPMFQPCVVPPKPWTGITGGGYWANGRRPLALVRTHSKKALMRYEDVYMPEVYKAINIAQNTAWKINKKVLAVANVITKWKHCPVEDIPAIEREELPMKPEDIDMNPEALTAWKRAAAAVYRKDKARKSRRISLEFMLEQANKFANHKAIWFPYNMDWRGRVYAVSMFNPQGNDMTKGLLTLAKGKPIGKEGYYWLKIHGANCAGVDKVPFPERIKFIEENHENIMACAKSPLENTWWAEQDSPFCFLAFCFEYAGVQHHGLSYNCSLPLAFDGSCSGIQHFSAMLRDEVGGRAVNLLPSETVQDIYGIVAKKVNEILQADAINGTDNEVVTVTDENTGEISEKVKLGTKALAGQWLAYGVTRSVTKRSVMTLAYGSKEFGFRQQVLEDTIQPAIDSGKGLMFTQPNQAAGYMAKLIWESVSVTVVAAVEAMNWLKSAAKLLAAEVKDKKTGEILRKRCAVHWVTPDGFPVWQEYKKPIQTRLNLMFLGQFRLQPTINTNKDSEIDAHKQESGIAPNFVHSQDGSHLRKTVVWAHEKYGIESFALIHDSFGTIPADAANLFKAVRETMVDTYESCDVLADFYDQFADQLHESQLDKMPALPAKGNLNLRDILESDFAFA

SEQ ID NO: 13 - protein, 881 aa, synthetic construct
MNTINIAKNDFSDIELAAIPFNTLADHYGERLAREQLALEHESYEMGEARFRKMFERQLKAGEVADNAAAKPLITTLLPKMIARINDWFEEVKAKRGKRPTAFQFLQEIKPEAVAYITIKTTLACLTSADNTTVQAVASAIGRAIEDEARFGRIRDLEAKHFKKNVEEQLNVGHVYKKAFMQVVEADMLSKGLLGGEAWSSWHKEDSIHVGVRCIEMLIESTGMVSLHRQNAGVVGQDSETIELAPEYAEAIATRAGALAGISPMFQPCVVPPKPWTGITGGGYWANGRRPLALVRTHSKKALMRYEDVYMPEVYKAINIAQNTAWKINKKVLAVANVITKWKHCPVEDIPAIEREELPMKPEDIDMNPEALTAWKRAAAAVARKDKARKSRRISLEFMLEQANKFANHKAIWFPYNMDWRGRVYAVSMFNPQGNDMTKGLLTLAKGKPIGKEGYYWLKIHGANCAGVDKVPFPERIKFIEENHENIMACAKSPLENTWWAEQDSPFCFLAFCFEYAGVQHHGLSYNCSLPLAFDGSCSGIQHFSAMLRDEVGGRAVNLLPSETVQDIYGIVAKKVNEILQADAINGTDNEVVTVTDENTGEISEKVKLGTKALAGQWLAYGVTRSVTKRSVMTLAYGSKEFGFRQQVLEDTIQPAIDSGKGLMFTQPNQAAGYMAKLIWESVSVTVVAAVEAMNWLKSAAKLLAAEVKDKKTGEILRKRCAVHWVTPDGFPVWQEYKKPIQTRLNLMFLGQFRLQPTINTNKDSEIDAHKQESGIAPNFVHSQDGSHLRKTVVWAHEKYGIESFALIHDSFGTIPADAANLFKAVRETMVDTYESCDVLADFYDQFADQLHESQLDKMPALPAKGNLNLRDILESDFAFA

SEQ ID NO: 14 - protein, 881 aa, synthetic construct
MNTINIAKNDFSDIELAAIPFNTLADHYGERLAREQLALEHESYEMGEARFRKMFERQLKAGEVADNAAAKPLITTLLPKMIARINDWFEEVKAKRGKRPTAFQFLQEIKPEAVAYITIKTTLACLTSADNTTVQAVASAIGRAIEDEARFGRIRDLEAKHFKKNVEEQLNVGHVYKKAFMQVVEADMLSKGLLGGEAWSSWHKEDSIHVGVRCIEMLIESTGMVSLHRQNAGVVGQDSETIELAPEYAEAIATRAGALAGISPMFQPCVVPPKPWTGITGGGYWANGRRPLALVRTHSKKALMRYEDVYMPEVYKAINIAQNTAWKINKKVLAVANVITKWKHCPVEDIPAIEREELPMKPEDIDMNPEALTAWKRAAAAVYRKAKARKSRRISLEFMLEQANKFANHKAIWFPYNMDWRGRVYAVSMFNPQGNDMTKGLLTLAKGKPIGKEGYYWLKIHGANCAGVDKVPFPERIKFIEENHENIMACAKSPLENTWWAEQDSPFCFLAFCFEYAGVQHHGLSYNCSLPLAFDGSCSGIQHFSAMLRDEVGGRAVNLLPSETVQDIYGIVAKKVNEILQADAINGTDNEVVTVTDENTGEISEKVKLGTKALAGQWLAYGVTRSVTKRSVMTLAYGSKEFGFRQQVLEDTIQPAIDSGKGLMFTQPNQAAGYMAKLIWESVSVTVVAAVEAMNWLKSAAKLLAAEVKDKKTGEILRKRCAVHWVTPDGFPVWQEYKKPIQTRLNLMFLGQFRLQPTINTNKDSEIDAHKQESGIAPNFVHSQDGSHLRKTVVWAHEKYGIESFALIHDSFGTIPADAANLFKAVRETMVDTYESCDVLADFYDQFADQLHESQLDKMPALPAKGNLNLRDILESDFAFA

SEQ ID NO: 15 - protein, 881 aa, synthetic construct
MNTINIAKNDFSDIELAAIPFNTLADHYGERLAREQLALEHESYEMGEARFRKMFERQLKAGEVADNAAAKPLITTLLPKMIARINDWFEEVKAKRGKRPTAFQFLQEIKPEAVAYITIKTTLACLTSADNTTVQAVASAIGRAIEDEARFGRIRDLEAKHFKKNVEEQLNVGHVYKKAFMQVVEADMLSKGLLGGEAWSSWHKEDSIHVGVRCIEMLIESTGMVSLHRQNAGVVGQDSETIELAPEYAEAIATRAGALAGISPMFQPCVVPPKPWTGITGGGYWANGRRPLALVRTHSKKALMRYEDVYMPEVYKAINIAQNTAWKINKKVLAVANVITKWKHCPVEDIPAIEREELPMKPEDIDMNPEALTAWKRAAAAVYRKGKARKSRRISLEFMLEQANKFANHKAIWFPYNMDWRGRVYAVSMFNPQGNDMTKGLLTLAKGKPIGKEGYYWLKIHGANCAGVDKVPFPERIKFIEENHENIMACAKSPLENTWWAEQDSPFCFLAFCFEYAGVQHHGLSYNCSLPLAFDGSCSGIQHFSAMLRDEVGGRAVNLLPSETVQDIYGIVAKKVNEILQADAINGTDNEVVTVTDENTGEISEKVKLGTKALAGQWLAYGVTRSVTKRSVMTLAYGSKEFGFRQQVLEDTIQPAIDSGKGLMFTQPNQAAGYMAKLIWESVSVTVVAAVEAMNWLKSAAKLLAAEVKDKKTGEILRKRCAVHWVTPDGFPVWQEYKKPIQTRLNLMFLGQFRLQPTINTNKDSEIDAHKQESGIAPNFVHSQDGSHLRKTVVWAHEKYGIESFALIHDSFGTIPADAANLFKAVRETMVDTYESCDVLADFYDQFADQLHESQLDKMPALPAKGNLNLRDILESDFAFA

SEQ ID NO: 16 - protein, 881 aa, synthetic construct
MNTINIAKNDFSDIELAAIPFNTLADHYGERLAREQLALEHESYEMGEARFRKMFERQLKAGEVADNAAAKPLITTLLPKMIARINDWFEEVKAKRGKRPTAFQFLQEIKPEAVAYITIKTTLACLTSADNTTVQAVASAIGRAIEDEARFGRIRDLEAKHFKKNVEEQLNVGHVYKKAFMQVVEADMLSKGLLGGEAWSSWHKEDSIHVGVRCIEMLIESTGMVSLHRQNAGVVGQDSETIELAPEYAEAIATRAGALAGISPMFQPCVVPPKPWTGITGGGYWANGRRPLALVRTHSKKALMRYEDVYMPEVYKAINIAQNTAWKINKKVLAVANVITKWKHCPVEDIPAIEREELPMKPEDIDMNPEALTAWKRAAAAVARKDKARKSRRISLEFMLEQANKFANHKAIWFPYNMDWRGRVYAVSMFNPQGNDMTKGLLTLAKGKPIGKEGYYWLKIHGANCAGVDKVPFPERIKFIEENHENIMACAKSPLENTWWAEQDSPFCFLAFCFEYAGVQHHGLSYNCSLPLAFDGSCSGIQHFSAMLRDEVGGRAVNLLPSETVQDIYGIVAKKVNEILQADAINGTDNEVVTVTDENTGEISEKVKLGTKALAGQWLAYGVTRSVTKRSVMTLAYGSKEFGFRQQVLEDTIQPAIDSGKGLMFTQPNQAAGYMAKLIWESVSVTVVAAVEAMNWLKSAAKLLAAEVKDKKTGEILRKRCAVHWVTPDGFPVWQEYKKPIQTRLNLMFLGQFRLQPTINTNKDSEIDAHKQESGIAPNFVHSQDGSHLRKTVVWAHEKYGIESFALIHDSFGTIPADAANLFKAVRETMVDTYESCDVLADFYDQFADQLHESQLDKMPALPAKGNLNLRDILESDYAFA

SEQ ID NO: 17 - protein, 881 aa, synthetic construct
MNTINIAKNDFSDIELAAIPFNTLADHYGERLAREQLALEHESYEMGEARFRKMFERQLKAGEVADNAAAKPLITTLLPKMIARINDWFEEVKAKRGKRPTAFQFLQEIKPEAVAYITIKTTLACLTSADNTTVQAVASAIGRAIEDEARFGRIRDLEAKHFKKNVEEQLNVGHVYKKAFMQVVEADMLSKGLLGGEAWSSWHKEDSIHVGVRCIEMLIESTGMVSLHRQNAGVVGQDSETIELAPEYAEAIATRAGALAGISPMFQPCVVPPKPWTGITGGGYWANGRRPLALVRTHSKKALMRYEDVYMPEVYKAINIAQNTAWKINKKVLAVANVITKWKHCPVEDIPAIEREELPMKPEDIDMNPEALTAWKRAAAAVYRKGKARKSRRISLEFMLEQANKFANHKAIWFPYNMDWRGRVYAVSMFNPQGNDMTKGLLTLAKGKPIGKEGYYWLKIHGANCAGVDKVPFPERIKFIEENHENIMACAKSPLENTWWAEQDSPFCFLAFCFEYAGVQHHGLSYNCSLPLAFDGSCSGIQHFSAMLRDEVGGRAVNLLPSETVQDIYGIVAKKVNEILQADAINGTDNEVVTVTDENTGEISEKVKLGTKALAGQWLAYGVTRSVTKRSVMTLAYGSKEFGFRQQVLEDTIQPAIDSGKGLMFTQPNQAAGYMAKLIWESVSVTVVAAVEAMNWLKSAAKLLAAEVKDKKTGEILRKRCAVHWVTPDGFPVWQEYKKPIQTRLNLMFLGQFRLQPTINTNKDSEIDAHKQESGIAPNFVHSQDGSHLRKTVVWAHEKYGIESFALIHDSFGTIPADAANLFKAVRETMVDTYESCDVLADFYDQFADQLHESQLDKMPALPAKGNLNLRDILESDYAFA

SEQ ID NO: 18 - protein, 883 aa, synthetic construct
MNTINIAKNDFSDIELAAIPFNTLADHYGERLAREQLALEHESYEMGEARFRKMFERQLKAGEVADNAAAKPLITTLLPKMIARINDWFEEVKAKRGKRPTAFQFLQEIKPEAVAYITIKTTLACLTSADNTTVQAVASAIGRAIEDEARFGRIRDLEAKHFKKNVEEQLNKRVGHVHKKAFMQVVEADMLSKGLLGGEAWSSWHKEDSIHVGVRCIEMLIESTGMVSLHRQNAGVVGQDSETIELAPEYAEAIATRAGALAGISPMFQPCVVPPKPWTGITGGGYWANGRRPLALVRTHSKKALMRYEDVYMPEVYKAINIAQNTAWKINKKVLAVANVITKWKHCPVEDIPAIEREELPMKPEDIDMNPEALTAWKRAAAAVYRKDKARKSRRISLEFMLEQANKFANHKAIWFPYNMDWRGRVYAVSMFNPQGNDMTKGLLTLAKGKPIGKEGYYWLKIHGANCAGVDKVPFPERIKFIEENHENIMACAKSPLENTWWAEQDSPFCFLAFCFEYAGVQHHGLSYNCSLPLAFDGSCSGIQHFSAMLRDEVGGRAVNLLPSETVQDIYGIVAKKVNEILQADAINGTDNEVVTVTDENTGEISEKVKLGTKALAGQWLAYGVTRSVTKRSVMTLAYGSKEFGFRQQVLEDTIQPAIDSGKGLMFTQPNQAAGYMAKLIWESVSVTVVAAVEAMNWLKSAAKLLAAEVKDKKTGEILRKRCAVHWVTPDGFPVWQEYKKPIQTRLNLMFLGQFRLQPTINTNKDSEIDAHKQESGIAPNFVHSQDGSHLRKTVVWAHEKYGIESFALIHDSFGTIPADAANLFKAVRETMVDTYESCDVLADFYDQFADQLHESQLDKMPALPAKGNLNLRDILESDFAFA

SEQ ID NO: 19 - protein, 883 aa, synthetic construct
MNTINIAKNDFSDIELAAIPFNTLADHYGERLAREQLALEHESYEMGEARFRKMFERQLKAGEVADNAAAKPLITTLLPKMIARINDWFEEVKAKRGKRPTAFQFLQEIKPEAVAYITIKTTLACLTSADNTTVQAVASAIGRAIEDEARFGRIRDLEAKHFKKNVEEQLNKRVGHVYKKAFMQVVEADMLSKGLLGGEAWSSWHKEDSIHVGVRCIEMLIESTGMVSLHRQNAGVVGQDSETIELAPEYAEAIATRAGALAGISPMFQPCVVPPKPWTGITGGGYWANGRRPLALVRTHSKKALMRYEDVYMPEVYKAINIAQNTAWKINKKVLAVANVITKWKHCPVEDIPAIEREELPMKPEDIDMNPEALTAWKRAAAAVARKDKARKSRRISLEFMLEQANKFANHKAIWFPYNMDWRGRVYAVSMFNPQGNDMTKGLLTLAKGKPIGKEGYYWLKIHGANCAGVDKVPFPERIKFIEENHENIMACAKSPLENTWWAEQDSPFCFLAFCFEYAGVQHHGLSYNCSLPLAFDGSCSGIQHFSAMLRDEVGGRAVNLLPSETVQDIYGIVAKKVNEILQADAINGTDNEVVTVTDENTGEISEKVKLGTKALAGQWLAYGVTRSVTKRSVMTLAYGSKEFGFRQQVLEDTIQPAIDSGKGLMFTQPNQAAGYMAKLIWESVSVTVVAAVEAMNWLKSAAKLLAAEVKDKKTGEILRKRCAVHWVTPDGFPVWQEYKKPIQTRLNLMFLGQFRLQPTINTNKDSEIDAHKQESGIAPNFVHSQDGSHLRKTVVWAHEKYGIESFALIHDSFGTIPADAANLFKAVRETMVDTYESCDVLADFYDQFADQLHESQLDKMPALPAKGNLNLRDILESDFAFA

SEQ ID NO: 20 - protein, 883 aa, synthetic construct
MNTINIAKNDFSDIELAAIPFNTLADHYGERLAREQLALEHESYEMGEARFRKMFERQLKAGEVADNAAAKPLITTLLPKMIARINDWFEEVKAKRGKRPTAFQFLQEIKPEAVAYITIKTTLACLTSADNTTVQAVASAIGRAIEDEARFGRIRDLEAKHFKKNVEEQLNKRVGHVYKKAFMQVVEADMLSKGLLGGEAWSSWHKEDSIHVGVRCIEMLIESTGMVSLHRQNAGVVGQDSETIELAPEYAEAIATRAGALAGISPMFQPCVVPPKPWTGITGGGYWANGRRPLALVRTHSKKALMRYEDVYMPEVYKAINIAQNTAWKINKKVLAVANVITKWKHCPVEDIPAIEREELPMKPEDIDMNPEALTAWKRAAAAVDRKDKARKSRRISLEFMLEQANKFANHKAIWFPYNMDWRGRVYAVSMFNPQGNDMTKGLLTLAKGKPIGKEGYYWLKIHGANCAGVDKVPFPERIKFIEENHENIMACAKSPLENTWWAEQDSPFCFLAFCFEYAGVQHHGLSYNCSLPLAFDGSCSGIQHFSAMLRDEVGGRAVNLLPSETVQDIYGIVAKKVNEILQADAINGTDNEVVTVTDENTGEISEKVKLGTKALAGQWLAYGVTRSVTKRSVMTLAYGSKEFGFRQQVLEDTIQPAIDSGKGLMFTQPNQAAGYMAKLIWESVSVTVVAAVEAMNWLKSAAKLLAAEVKDKKTGEILRKRCAVHWVTPDGFPVWQEYKKPIQTRLNLMFLGQFRLQPTINTNKDSEIDAHKQESGIAPNFVHSQDGSHLRKTVVWAHEKYGIESFALIHDSFGTIPADAANLFKAVRETMVDTYESCDVLADFYDQFADQLHESQLDKMPALPAKGNLNLRDILESDFAFA

SEQ ID NO: 21 - protein, 883 aa, synthetic construct
MNTINIAKNDFSDIELAAIPFNTLADHYGERLAREQLALEHESYEMGEARFRKMFERQLKAGEVADNAAAKPLITTLLPKMIARINDWFEEVKAKRGKRPTAFQFLQEIKPEAVAYITIKTTLACLTSADNTTVQAVASAIGRAIEDEARFGRIRDLEAKHFKKNVEEQLNKRVGHVYKKAFMQVVEADMLSKGLLGGEAWSSWHKEDSIHVGVRCIEMLIESTGMVSLHRQNAGVVGQDSETIELAPEYAEAIATRAGALAGISPMFQPCVVPPKPWTGITGGGYWANGRRPLALVRTHSKKALMRYEDVYMPEVYKAINIAQNTAWKINKKVLAVANVITKWKHCPVEDIPAIEREELPMKPEDIDMNPEALTAWKRAAAAVYRKDKARKSRRISLEFMLEQANKFANHKAIWFPYNMDWRGRVYAVSMFNPQGNDMTKGLLTLAKGKPIGKEGYYWLKIHGANCAGVDKVPFPERIKFIEENHENIMACAKSPLENTWWAEQDSPFCFLAFCFEYAGVQHHGLSYNCSLPLAFDGSCSGIQHFSAMLRDEVGGRAVNLLPSETVQDIYGIVAKKVNEILQADAINGTDNEVVTVTDENTGEISEKVKLGTKALAGQWLAYGVTRSVTKRSVMTLAYGSKEFGFRQQVLEDTIQPAIDSGKGLMFTQPNQAAGYMAKLIWESVSVTVVAAVEAMNWLKSAAKLLAAEVKDKKTGEILRKRCAVHWVTPDGFPVWQEYKKPIQTRLNLMFLGQFRLQPTINTNKDSEIDAHKQESGIAPNFVHSQDGSHLRKTVVWAHEKYGIESFALIHDSFGTIPADAANLFKAVRETMVDTYESCDVLADFYDQFADQLHESQLDKMPALPAKGNLNLRDILESDAAFA

SEQ ID NO: 22 - protein, 883 aa, synthetic construct
MNTINIAKNDFSDIELAAIPFNTLADHYGERLAREQLALEHESYEMGEARFRKMFERQLKAGEVADNAAAKPLITTLLPKMIARINDWFEEVKAKRGKRPTAFQFLQEIKPEAVAYITIKTTLACLTSADNTTVQAVASAIGRAIEDEARFGRIRDLEAKHFKKNVEEQLNKRVGHVYKKAFMQVVEADMLSKGLLGGEAWSSWHKEDSIHVGVRCIEMLIESTGMVSLHRQNAGVVGQDSETIELAPEYAEAIATRAGALAGISPMFQPCVVPPKPWTGITGGGYWANGRRPLALVRTHSKKALMRYEDVYMPEVYKAINIAQNTAWKINKKVLAVANVITKWKHCPVEDIPAIEREELPMKPEDIDMNPEALTAWKRAAAAVYRKDKARKSRRISLEFMLEQANKFANHKAIWFPYNMDWRGRVYAVSMFNPQGNDMTKGLLTLAKGKPIGKEGYYWLKIHGANCAGVDKVPFPERIKFIEENHENIMACAKSPLENTWWAEQDSPFCFLAFCFEYAGVQHHGLSYNCSLPLAFDGSCSGIQHFSAMLRDEVGGRAVNLLPSETVQDIYGIVAKKVNEILQADAINGTDNEVVTVTDENTGEISEKVKLGTKALAGQWLAYGVTRSVTKRSVMTLAYGSKEFGFRQQVLEDTIQPAIDSGKGLMFTQPNQAAGYMAKLIWESVSVTVVAAVEAMNWLKSAAKLLAAEVKDKKTGEILRKRCAVHWVTPDGFPVWQEYKKPIQTRLNLMFLGQFRLQPTINTNKDSEIDAHKQESGIAPNFVHSQDGSHLRKTVVWAHEKYGIESFALIHDSFGTIPADAANLFKAVRETMVDTYESCDVLADFYDQFADQLHESQLDKMPALPAKGNLNLRDILESDGAFA

SEQ ID NO: 23 - protein, 883 aa, synthetic construct
MNTINIAKNDFSDIELAAIPFNTLADHYGERLAREQLALEHESYEMGEARFRKMFERQLKAGEVADNAAAKPLITTLLPKMIARINDWFEEVKAKRGKRPTAFQFLQEIKPEAVAYITIKTTLACLTSADNTTVQAVASAIGRAIEDEARFGRIRDLEAKHFKKNVEEQLNKRVGHVYKKAFMQVVEADMLSKGLLGGEAWSSWHKEDSIHVGVRCIEMLIESTGMVSLHRQNAGVVGQDSETIELAPEYAEAIATRAGALAGISPMFQPCVVPPKPWTGITGGGYWANGRRPLALVRTHSKKALMRYEDVYMPEVYKAINIAQNTAWKINKKVLAVANVITKWKHCPVEDIPAIEREELPMKPEDIDMNPEALTAWKRAAAAVYRKDKARKSRRISLEFMLEQANKFANHKAIWFPYNMDWRGRVYAVSMFNPQGNDMTKGLLTLAKGKPIGKEGYYWLKIHGANCAGVDKVPFPERIKFIEENHENIMACAKSPLENTWWAEQDSPFCFLAFCFEYAGVQHHGLSYNCSLPLAFDGSCSGIQHFSAMLRDEVGGRAVNLLPSETVQDIYGIVAKKVNEILQADAINGTDNEVVTVTDENTGEISEKVKLGTKALAGQWLAYGVTRSVTKRSVMTLAYGSKEFGFRQQVLEDTIQPAIDSGKGLMFTQPNQAAGYMAKLIWESVSVTVVAAVEAMNWLKSAAKLLAAEVKDKKTGEILRKRCAVHWVTPDGFPVWQEYKKPIQTRLNLMFLGQFRLQPTINTNKDSEIDAHKQESGIAPNFVHSQDGSHLRKTVVWAHEKYGIESFALIHDSFGTIPADAANLFKAVRETMVDTYESCDVLADFYDQFADQLHESQLDKMPALPAKGNLNLRDILESDWAFA

SEQ ID NO: 24 - protein, 883 aa, synthetic construct
MNTINIAKNDFSDIELAAIPFNTLADHYGERLAREQLALEHESYEMGEARFRKMFERQLKAGEVADNAAAKPLITTLLPKMIARINDWFEEVKAKRGKRPTAFQFLQEIKPEAVAYITIKTTLACLTSADNTTVQAVASAIGRAIEDEARFGRIRDLEAKHFKKNVEEQLNKRVGHVYKKAFMQVVEADMLSKGLLGGEAWSSWHKEDSIHVGVRCIEMLIESTGMVSLHRQNAGVVGQDSETIELAPEYAEAIATRAGALAGISPMFQPCVVPPKPWTGITGGGYWANGRRPLALVRTHSKKALMRYEDVYMPEVYKAINIAQNTAWKINKKVLAVANVITKWKHCPVEDIPAIEREELPMKPEDIDMNPEALTAWKRAAAAVYRKAKARKSRRISLEFMLEQANKFANHKAIWFPYNMDWRGRVYAVSMFNPQGNDMTKGLLTLAKGKPIGKEGYYWLKIHGANCAGVDKVPFPERIKFIEENHENIMACAKSPLENTWWAEQDSPFCFLAFCFEYAGVQHHGLSYNCSLPLAFDGSCSGIQHFSAMLRDEVGGRAVNLLPSETVQDIYGIVAKKVNEILQADAINGTDNEVVTVTDENTGEISEKVKLGTKALAGQWLAYGVTRSVTKRSVMTLAYGSKEFGFRQQVLEDTIQPAIDSGKGLMFTQPNQAAGYMAKLIWESVSVTVVAAVEAMNWLKSAAKLLAAEVKDKKTGEILRKRCAVHWVTPDGFPVWQEYKKPIQTRLNLMFLGQFRLQPTINTNKDSEIDAHKQESGIAPNFVHSQDGSHLRKTVVWAHEKYGIESFALIHDSFGTIPADAANLFKAVRETMVDTYESCDVLADFYDQFADQLHESQLDKMPALPAKGNLNLRDILESDFAFA

SEQ ID NO: 25 - protein, 883 aa, synthetic construct
MNTINIAKNDFSDIELAAIPFNTLADHYGERLAREQLALEHESYEMGEARFRKMFERQLKAGEVADNAAAKPLITTLLPKMIARINDWFEEVKAKRGKRPTAFQFLQEIKPEAVAYITIKTTLACLTSADNTTVQAVASAIGRAIEDEARFGRIRDLEAKHFKKNVEEQLNKRVGHVYKKAFMQVVEADMLSKGLLGGEAWSSWHKEDSIHVGVRCIEMLIESTGMVSLHRQNAGVVGQDSETIELAPEYAEAIATRAGALAGISPMFQPCVVPPKPWTGITGGGYWANGRRPLALVRTHSKKALMRYEDVYMPEVYKAINIAQNTAWKINKKVLAVANVITKWKHCPVEDIPAIEREELPMKPEDIDMNPEALTAWKRAAAAVYRKGKARKSRRISLEFMLEQANKFANHKAIWFPYNMDWRGRVYAVSMFNPQGNDMTKGLLTLAKGKPIGKEGYYWLKIHGANCAGVDKVPFPERIKFIEENHENIMACAKSPLENTWWAEQDSPFCFLAFCFEYAGVQHHGLSYNCSLPLAFDGSCSGIQHFSAMLRDEVGGRAVNLLPSETVQDIYGIVAKKVNEILQADAINGTDNEVVTVTDENTGEISEKVKLGTKALAGQWLAYGVTRSVTKRSVMTLAYGSKEFGFRQQVLEDTIQPAIDSGKGLMFTQPNQAAGYMAKLIWESVSVTVVAAVEAMNWLKSAAKLLAAEVKDKKTGEILRKRCAVHWVTPDGFPVWQEYKKPIQTRLNLMFLGQFRLQPTINTNKDSEIDAHKQESGIAPNFVHSQDGSHLRKTVVWAHEKYGIESFALIHDSFGTIPADAANLFKAVRETMVDTYESCDVLADFYDQFADQLHESQLDKMPALPAKGNLNLRDILESDFAFA

SEQ ID NO: 26 - protein, 883 aa, synthetic construct
MNTINIAKNDFSDIELAAIPFNTLADHYGERLAREQLALEHESYEMGEARFRKMFERQLKAGEVADNAAAKPLITTLLPKMIARINDWFEEVKAKRGKRPTAFQFLQEIKPEAVAYITIKTTLACLTSADNTTVQAVASAIGRAIEDEARFGRIRDLEAKHFKKNVEEQLGKRVGHVYKKAFMQVVEADMLSKGLLGGEAWSSWHKEDSIHVGVRCIEMLIESTGMVSLHRQNAGVVGQDSETIELAPEYAEAIATRAGALAGISPMFQPCVVPPKPWTGITGGGYWANGRRPLALVRTHSKKALMRYEDVYMPEVYKAINIAQNTAWKINKKVLAVANVITKWKHCPVEDIPAIEREELPMKPEDIDMNPEALTAWKRAAAAVYRKDKARKSRRISLEFMLEQANKFANHKAIWFPYNMDWRGRVYAVSMFNPQGNDMTKGLLTLAKGKPIGKEGYYWLKIHGANCAGVDKVPFPERIKFIEENHENIMACAKSPLENTWWAEQDSPFCFLAFCFEYAGVQHHGLSYNCSLPLAFDGSCSGIQHFSAMLRDEVGGRAVNLLPSETVQDIYGIVAKKVNEILQADAINGTDNEVVTVTDENTGEISEKVKLGTKALAGQWLAYGVTRSVTKRSVMTLAYGSKEFGFRQQVLEDTIQPAIDSGKGLMFTQPNQAAGYMAKLIWESVSVTVVAAVEAMNWLKSAAKLLAAEVKDKKTGEILRKRCAVHWVTPDGFPVWQEYKKPIQTRLNLMFLGQFRLQPTINTNKDSEIDAHKQESGIAPNFVHSQDGSHLRKTVVWAHEKYGIESFALIHDSFGTIPADAANLFKAVRETMVDTYESCDVLADFYDQFADQLHESQLDKMPALPAKGNLNLRDILESDFAFA

SEQ ID NO: 27 - protein, 883 aa, synthetic construct
MNTINIAKNDFSDIELAAIPFNTLADHYGERLAREQLALEHESYEMGEARFRKMFERQLKAGEVADNAAAKPLITTLLPKMIARINDWFEEVKAKRGKRPTAFQFLQEIKPEAVAYITIKTTLACLTSADNTTVQAVASAIGRAIEDEARFGRIRDLEAKHFKKNVEEQLNERVGHVYKKAFMQVVEADMLSKGLLGGEAWSSWHKEDSIHVGVRCIEMLIESTGMVSLHRQNAGVVGQDSETIELAPEYAEAIATRAGALAGISPMFQPCVVPPKPWTGITGGGYWANGRRPLALVRTHSKKALMRYEDVYMPEVYKAINIAQNTAWKINKKVLAVANVITKWKHCPVEDIPAIEREELPMKPEDIDMNPEALTAWKRAAAAVYRKDKARKSRRISLEFMLEQANKFANHKAIWFPYNMDWRGRVYAVSMFNPQGNDMTKGLLTLAKGKPIGKEGYYWLKIHGANCAGVDKVPFPERIKFIEENHENIMACAKSPLENTWWAEQDSPFCFLAFCFEYAGVQHHGLSYNCSLPLAFDGSCSGIQHFSAMLRDEVGGRAVNLLPSETVQDIYGIVAKKVNEILQADAINGTDNEVVTVTDENTGEISEKVKLGTKALAGQWLAYGVTRSVTKRSVMTLAYGSKEFGFRQQVLEDTIQPAIDSGKGLMFTQPNQAAGYMAKLIWESVSVTVVAAVEAMNWLKSAAKLLAAEVKDKKTGEILRKRCAVHWVTPDGFPVWQEYKKPIQTRLNLMFLGQFRLQPTINTNKDSEIDAHKQESGIAPNFVHSQDGSHLRKTVVWAHEKYGIESFALIHDSFGTIPADAANLFKAVRETMVDTYESCDVLADFYDQFADQLHESQLDKMPALPAKGNLNLRDILESDFAFA

SEQ ID NO: 28 - protein, 883 aa, synthetic construct
MNTINIAKNDFSDIELAAIPFNTLADHYGERLAREQLALEHESYEMGEARFRKMFERQLKAGEVADNAAAKPLITTLLPKMIARINDWFEEVKAKRGKRPTAFQFLQEIKPEAVAYITIKTTLACLTSADNTTVQAVASAIGRAIEDEARFGRIRDLEAKHFKKNVEEQLNDRVGHVYKKAFMQVVEADMLSKGLLGGEAWSSWHKEDSIHVGVRCIEMLIESTGMVSLHRQNAGVVGQDSETIELAPEYAEAIATRAGALAGISPMFQPCVVPPKPWTGITGGGYWANGRRPLALVRTHSKKALMRYEDVYMPEVYKAINIAQNTAWKINKKVLAVANVITKWKHCPVEDIPAIEREELPMKPEDIDMNPEALTAWKRAAAAVYRKDKARKSRRISLEFMLEQANKFANHKAIWFPYNMDWRGRVYAVSMFNPQGNDMTKGLLTLAKGKPIGKEGYYWLKIHGANCAGVDKVPFPERIKFIEENHENIMACAKSPLENTWWAEQDSPFCFLAFCFEYAGVQHHGLSYNCSLPLAFDGSCSGIQHFSAMLRDEVGGRAVNLLPSETVQDIYGIVAKKVNEILQADAINGTDNEVVTVTDENTGEISEKVKLGTKALAGQWLAYGVTRSVTKRSVMTLAYGSKEFGFRQQVLEDTIQPAIDSGKGLMFTQPNQAAGYMAKLIWESVSVTVVAAVEAMNWLKSAAKLLAAEVKDKKTGEILRKRCAVHWVTPDGFPVWQEYKKPIQTRLNLMFLGQFRLQPTINTNKDSEIDAHKQESGIAPNFVHSQDGSHLRKTVVWAHEKYGIESFALIHDSFGTIPADAANLFKAVRETMVDTYESCDVLADFYDQFADQLHESQLDKMPALPAKGNLNLRDILESDFAFA

SEQ ID NO: 29 - protein, 883 aa, synthetic construct
MNTINIAKNDFSDIELAAIPFNTLADHYGERLAREQLALEHESYEMGEARFRKMFERQLKAGEVADNAAAKPLITTLLPKMIARINDWFEEVKAKRGKRPTAFQFLQEIKPEAVAYITIKTTLACLTSADNTTVQAVASAIGRAIEDEARFGRIRDLEAKHFKKNVEEQLNKEVGHVYKKAFMQVVEADMLSKGLLGGEAWSSWHKEDSIHVGVRCIEMLIESTGMVSLHRQNAGVVGQDSETIELAPEYAEAIATRAGALAGISPMFQPCVVPPKPWTGITGGGYWANGRRPLALVRTHSKKALMRYEDVYMPEVYKAINIAQNTAWKINKKVLAVANVITKWKHCPVEDIPAIEREELPMKPEDIDMNPEALTAWKRAAAAVYRKDKARKSRRISLEFMLEQANKFANHKAIWFPYNMDWRGRVYAVSMFNPQGNDMTKGLLTLAKGKPIGKEGYYWLKIHGANCAGVDKVPFPERIKFIEENHENIMACAKSPLENTWWAEQDSPFCFLAFCFEYAGVQHHGLSYNCSLPLAFDGSCSGIQHFSAMLRDEVGGRAVNLLPSETVQDIYGIVAKKVNEILQADAINGTDNEVVTVTDENTGEISEKVKLGTKALAGQWLAYGVTRSVTKRSVMTLAYGSKEFGFRQQVLEDTIQPAIDSGKGLMFTQPNQAAGYMAKLIWESVSVTVVAAVEAMNWLKSAAKLLAAEVKDKKTGEILRKRCAVHWVTPDGFPVWQEYKKPIQTRLNLMFLGQFRLQPTINTNKDSEIDAHKQESGIAPNFVHSQDGSHLRKTVVWAHEKYGIESFALIHDSFGTIPADAANLFKAVRETMVDTYESCDVLADFYDQFADQLHESQLDKMPALPAKGNLNLRDILESDFAFA

SEQ ID NO: 30 - protein, 883 aa, synthetic construct
MNTINIAKNDFSDIELAAIPFNTLADHYGERLAREQLALEHESYEMGEARFRKMFERQLKAGEVADNAAAKPLITTLLPKMIARINDWFEEVKAKRGKRPTAFQFLQEIKPEAVAYITIKTTLACLTSADNTTVQAVASAIGRAIEDEARFGRIRDLEAKHFKKNVEEQLNKDVGHVYKKAFMQVVEADMLSKGLLGGEAWSSWHKEDSIHVGVRCIEMLIESTGMVSLHRQNAGVVGQDSETIELAPEYAEAIATRAGALAGISPMFQPCVVPPKPWTGITGGGYWANGRRPLALVRTHSKKALMRYEDVYMPEVYKAINIAQNTAWKINKKVLAVANVITKWKHCPVEDIPAIEREELPMKPEDIDMNPEALTAWKRAAAAVYRKDKARKSRRISLEFMLEQANKFANHKAIWFPYNMDWRGRVYAVSMFNPQGNDMTKGLLTLAKGKPIGKEGYYWLKIHGANCAGVDKVPFPERIKFIEENHENIMACAKSPLENTWWAEQDSPFCFLAFCFEYAGVQHHGLSYNCSLPLAFDGSCSGIQHFSAMLRDEVGGRAVNLLPSETVQDIYGIVAKKVNEILQADAINGTDNEVVTVTDENTGEISEKVKLGTKALAGQWLAYGVTRSVTKRSVMTLAYGSKEFGFRQQVLEDTIQPAIDSGKGLMFTQPNQAAGYMAKLIWESVSVTVVAAVEAMNWLKSAAKLLAAEVKDKKTGEILRKRCAVHWVTPDGFPVWQEYKKPIQTRLNLMFLGQFRLQPTINTNKDSEIDAHKQESGIAPNFVHSQDGSHLRKTVVWAHEKYGIESFALIHDSFGTIPADAANLFKAVRETMVDTYESCDVLADFYDQFADQLHESQLDKMPALPAKGNLNLRDILESDFAFA

SEQ ID NO: 31 - protein, 883 aa, synthetic construct
MNTINIAKNDFSDIELAAIPFNTLADHYGERLAREQLALEHESYEMGEARFRKMFERQLKAGEVADNAAAKPLITTLLPKMIARINDWFEEVKAKRGKRPTAFQFLQEIKPEAVAYITIKTTLACLTSADNTTVQAVASAIGRAIEDEARFGRIRDLEAKHFKKNVEEQLNKAVGHVYKKAFMQVVEADMLSKGLLGGEAWSSWHKEDSIHVGVRCIEMLIESTGMVSLHRQNAGVVGQDSETIELAPEYAEAIATRAGALAGISPMFQPCVVPPKPWTGITGGGYWANGRRPLALVRTHSKKALMRYEDVYMPEVYKAINIAQNTAWKINKKVLAVANVITKWKHCPVEDIPAIEREELPMKPEDIDMNPEALTAWKRAAAAVYRKDKARKSRRISLEFMLEQANKFANHKAIWFPYNMDWRGRVYAVSMFNPQGNDMTKGLLTLAKGKPIGKEGYYWLKIHGANCAGVDKVPFPERIKFIEENHENIMACAKSPLENTWWAEQDSPFCFLAFCFEYAGVQHHGLSYNCSLPLAFDGSCSGIQHFSAMLRDEVGGRAVNLLPSETVQDIYGIVAKKVNEILQADAINGTDNEVVTVTDENTGEISEKVKLGTKALAGQWLAYGVTRSVTKRSVMTLAYGSKEFGFRQQVLEDTIQPAIDSGKGLMFTQPNQAAGYMAKLIWESVSVTVVAAVEAMNWLKSAAKLLAAEVKDKKTGEILRKRCAVHWVTPDGFPVWQEYKKPIQTRLNLMFLGQFRLQPTINTNKDSEIDAHKQESGIAPNFVHSQDGSHLRKTVVWAHEKYGIESFALIHDSFGTIPADAANLFKAVRETMVDTYESCDVLADFYDQFADQLHESQLDKMPALPAKGNLNLRDILESDFAFA

SEQ ID NO: 32 - protein, 883 aa, synthetic construct
MNTINIAKNDFSDIELAAIPFNTLADHYGERLAREQLALEHESYEMGEARFRKMFERQLKAGEVADNAAAKPLITTLLPKMIARINDWFEEVKAKRGKRPTAFQFLQEIKPEAVAYITIKTTLACLTSADNTTVQAVASAIGRAIEDEARFGRIRDLEAKHFKKNVEEQLNAGVGHVYKKAFMQVVEADMLSKGLLGGEAWSSWHKEDSIHVGVRCIEMLIESTGMVSLHRQNAGVVGQDSETIELAPEYAEAIATRAGALAGISPMFQPCVVPPKPWTGITGGGYWANGRRPLALVRTHSKKALMRYEDVYMPEVYKAINIAQNTAWKINKKVLAVANVITKWKHCPVEDIPAIEREELPMKPEDIDMNPEALTAWKRAAAAVARKDKARKSRRISLEFMLEQANKFANHKAIWFPYNMDWRGRVYAVSMFNPQGNDMTKGLLTLAKGKPIGKEGYYWLKIHGANCAGVDKVPFPERIKFIEENHENIMACAKSPLENTWWAEQDSPFCFLAFCFEYAGVQHHGLSYNCSLPLAFDGSCSGIQHFSAMLRDEVGGRAVNLLPSETVQDIYGIVAKKVNEILQADAINGTDNEVVTVTDENTGEISEKVKLGTKALAGQWLAYGVTRSVTKRSVMTLAYGSKEFGFRQQVLEDTIQPAIDSGKGLMFTQPNQAAGYMAKLIWESVSVTVVAAVEAMNWLKSAAKLLAAEVKDKKTGEILRKRCAVHWVTPDGFPVWQEYKKPIQTRLNLMFLGQFRLQPTINTNKDSEIDAHKQESGIAPNFVHSQDGSHLRKTVVWAHEKYGIESFALIHDSFGTIPADAANLFKAVRETMVDTYESCDVLADFYDQFADQLHESQLDKMPALPAKGNLNLRDILESDFAFA

SEQ ID NO: 33 - protein, 883 aa, synthetic construct
MNTINIAKNDFSDIELAAIPFNTLADHYGERLAREQLALEHESYEMGEARFRKMFERQLKAGEVADNAAAKPLITTLLPKMIARINDWFEEVKAKRGKRPTAFQFLQEIKPEAVAYITIKTTLACLTSADNTTVQAVASAIGRAIEDEARFGRIRDLEAKHFKKNVEEQLNAGVGHVYKKAFMQVVEADMLSKGLLGGEAWSSWHKEDSIHVGVRCIEMLIESTGMVSLHRQNAGVVGQDSETIELAPEYAEAIATRAGALAGISPMFQPCVVPPKPWTGITGGGYWANGRRPLALVRTHSKKALMRYEDVYMPEVYKAINIAQNTAWKINKKVLAVANVITKWKHCPVEDIPAIEREELPMKPEDIDMNPEALTAWKRAAAAVYRKYKARKSRRISLEFMLEQANKFANHKAIWFPYNMDWRGRVYAVSMFNPQGNDMTKGLLTLAKGKPIGKEGYYWLKIHGANCAGVDKVPFPERIKFIEENHENIMACAKSPLENTWWAEQDSPFCFLAFCFEYAGVQHHGLSYNCSLPLAFDGSCSGIQHFSAMLRDEVGGRAVNLLPSETVQDIYGIVAKKVNEILQADAINGTDNEVVTVTDENTGEISEKVKLGTKALAGQWLAYGVTRSVTKRSVMTLAYGSKEFGFRQQVLEDTIQPAIDSGKGLMFTQPNQAAGYMAKLIWESVSVTVVAAVEAMNWLKSAAKLLAAEVKDKKTGEILRKRCAVHWVTPDGFPVWQEYKKPIQTRLNLMFLGQFRLQPTINTNKDSEIDAHKQESGIAPNFVHSQDGSHLRKTVVWAHEKYGIESFALIHDSFGTIPADAANLFKAVRETMVDTYESCDVLADFYDQFADQLHESQLDKMPALPAKGNLNLRDILESDFAFA

SEQ ID NO: 34 - protein, 883 aa, synthetic construct
MNTINIAKNDFSDIELAAIPFNTLADHYGERLAREQLALEHESYEMGEARFRKMFERQLKAGEVADNAAAKPLITTLLPKMIARINDWFEEVKAKRGKRPTAFQFLQEIKPEAVAYITIKTTLACLTSADNTTVQAVASAIGRAIEDEARFGRIRDLEAKHFKKNVEEQLNAGVGHVYKKAFMQVVEADMLSKGLLGGEAWSSWHKEDSIHVGVRCIEMLIESTGMVSLHRQNAGVVGQDSETIELAPEYAEAIATRAGALAGISPMFQPCVVPPKPWTGITGGGYWANGRRPLALVRTHSKKALMRYEDVYMPEVYKAINIAQNTAWKINKKVLAVANVITKWKHCPVEDIPAIEREELPMKPEDIDMNPEALTAWKRAAAAVYRKDKARKSRRISLEFMLEQANKFANHKAIWFPYNMDWRGRVYAVSMFNPQGNDMTKGLLTLAKGKPIGKEGYYWLKIHGANCAGVDKVPFPERIKFIEENHENIMACAKSPLENTWWAEQDSPFCFLAFCFEYAGVQHHGLSYNCSLPLAFDGSCSGIQHFSAMLRDEVGGRAVNLLPSETVQDIYGIVAKKVNEILQADAINGTDNEVVTVTDENTGEISEKVKLGTKALAGQWLAYGVTRSVTKRSVMTLAYGSKEFGFRQQVLEDTIQPAIDSGKGLMFTQPNQAAGYMAKLIWESVSVTVVAAVEAMNWLKSAAKLLAAEVKDKKTGEILRKRCAVHWVTPDGFPVWQEYKKPIQTRLNLMFLGQFRLQPTINTNKDSEIDAHKQESGIAPNFVHSQDGSHLRKTVVWAHEKYGIESFALIHDSFGTIPADAANLFKAVRETMVDTYESCDVLADFYDQFADQLHESQLDKMPALPAKGNLNLRDILESDYAFA

SEQ ID NO: 35 - protein, 883 aa, synthetic construct
MNTINIAKNDFSDIELAAIPFNTLADHYGERLAREQLALEHESYEMGEARFRKMFERQLKAGEVADNAAAKPLITTLLPKMIARINDWFEEVKAKRGKRPTAFQFLQEIKPEAVAYITIKTTLACLTSADNTTVQAVASAIGRAIEDEARFGRIRDLEAKHFKKNVEEQLNGGVGHVYKKAFMQVVEADMLSKGLLGGEAWSSWHKEDSIHVGVRCIEMLIESTGMVSLHRQNAGVVGQDSETIELAPEYAEAIATRAGALAGISPMFQPCVVPPKPWTGITGGGYWANGRRPLALVRTHSKKALMRYEDVYMPEVYKAINIAQNTAWKINKKVLAVANVITKWKHCPVEDIPAIEREELPMKPEDIDMNPEALTAWKRAAAAVARKDKARKSRRISLEFMLEQANKFANHKAIWFPYNMDWRGRVYAVSMFNPQGNDMTKGLLTLAKGKPIGKEGYYWLKIHGANCAGVDKVPFPERIKFIEENHENIMACAKSPLENTWWAEQDSPFCFLAFCFEYAGVQHHGLSYNCSLPLAFDGSCSGIQHFSAMLRDEVGGRAVNLLPSETVQDIYGIVAKKVNEILQADAINGTDNEVVTVTDENTGEISEKVKLGTKALAGQWLAYGVTRSVTKRSVMTLAYGSKEFGFRQQVLEDTIQPAIDSGKGLMFTQPNQAAGYMAKLIWESVSVTVVAAVEAMNWLKSAAKLLAAEVKDKKTGEILRKRCAVHWVTPDGFPVWQEYKKPIQTRLNLMFLGQFRLQPTINTNKDSEIDAHKQESGIAPNFVHSQDGSHLRKTVVWAHEKYGIESFALIHDSFGTIPADAANLFKAVRETMVDTYESCDVLADFYDQFADQLHESQLDKMPALPAKGNLNLRDILESDFAFA

SEQ ID NO: 36 - protein, 883 aa, synthetic construct
MNTINIAKNDFSDIELAAIPFNTLADHYGERLAREQLALEHESYEMGEARFRKMFERQLKAGEVADNAAAKPLITTLLPKMIARINDWFEEVKAKRGKRPTAFQFLQEIKPEAVAYITIKTTLACLTSADNTTVQAVASAIGRAIEDEARFGRIRDLEAKHFKKNVEEQLNGGVGHVYKKAFMQVVEADMLSKGLLGGEAWSSWHKEDSIHVGVRCIEMLIESTGMVSLHRQNAGVVGQDSETIELAPEYAEAIATRAGALAGISPMFQPCVVPPKPWTGITGGGYWANGRRPLALVRTHSKKALMRYEDVYMPEVYKAINIAQNTAWKINKKVLAVANVITKWKHCPVEDIPAIEREELPMKPEDIDMNPEALTAWKRAAAAVYRKYKARKSRRISLEFMLEQANKFANHKAIWFPYNMDWRGRVYAVSMFNPQGNDMTKGLLTLAKGKPIGKEGYYWLKIHGANCAGVDKVPFPERIKFIEENHENIMACAKSPLENTWWAEQDSPFCFLAFCFEYAGVQHHGLSYNCSLPLAFDGSCSGIQHFSAMLRDEVGGRAVNLLPSETVQDIYGIVAKKVNEILQADAINGTDNEVVTVTDENTGEISEKVKLGTKALAGQWLAYGVTRSVTKRSVMTLAYGSKEFGFRQQVLEDTIQPAIDSGKGLMFTQPNQAAGYMAKLIWESVSVTVVAAVEAMNWLKSAAKLLAAEVKDKKTGEILRKRCAVHWVTPDGFPVWQEYKKPIQTRLNLMFLGQFRLQPTINTNKDSEIDAHKQESGIAPNFVHSQDGSHLRKTVVWAHEKYGIESFALIHDSFGTIPADAANLFKAVRETMVDTYESCDVLADFYDQFADQLHESQLDKMPALPAKGNLNLRDILESDFAFA

SEQ ID NO: 37 - protein, 883 aa, synthetic construct
MNTINIAKNDFSDIELAAIPFNTLADHYGERLAREQLALEHESYEMGEARFRKMFERQLKAGEVADNAAAKPLITTLLPKMIARINDWFEEVKAKRGKRPTAFQFLQEIKPEAVAYITIKTTLACLTSADNTTVQAVASAIGRAIEDEARFGRIRDLEAKHFKKNVEEQLNGGVGHVYKKAFMQVVEADMLSKGLLGGEAWSSWHKEDSIHVGVRCIEMLIESTGMVSLHRQNAGVVGQDSETIELAPEYAEAIATRAGALAGISPMFQPCVVPPKPWTGITGGGYWANGRRPLALVRTHSKKALMRYEDVYMPEVYKAINIAQNTAWKINKKVLAVANVITKWKHCPVEDIPAIEREELPMKPEDIDMNPEALTAWKRAAAAVYRKDKARKSRRISLEFMLEQANKFANHKAIWFPYNMDWRGRVYAVSMFNPQGNDMTKGLLTLAKGKPIGKEGYYWLKIHGANCAGVDKVPFPERIKFIEENHENIMACAKSPLENTWWAEQDSPFCFLAFCFEYAGVQHHGLSYNCSLPLAFDGSCSGIQHFSAMLRDEVGGRAVNLLPSETVQDIYGIVAKKVNEILQADAINGTDNEVVTVTDENTGEISEKVKLGTKALAGQWLAYGVTRSVTKRSVMTLAYGSKEFGFRQQVLEDTIQPAIDSGKGLMFTQPNQAAGYMAKLIWESVSVTVVAAVEAMNWLKSAAKLLAAEVKDKKTGEILRKRCAVHWVTPDGFPVWQEYKKPIQTRLNLMFLGQFRLQPTINTNKDSEIDAHKQESGIAPNFVHSQDGSHLRKTVVWAHEKYGIESFALIHDSFGTIPADAANLFKAVRETMVDTYESCDVLADFYDQFADQLHESQLDKMPALPAKGNLNLRDILESDYAFA

SEQ ID NO: 38 - protein, 881 aa, synthetic construct
MNTINIAKNDFSDIELAAIPFNTLADHYGERLAREQLALEHESYEMGEARFRKMFERQLKAGEVADNAAAKPLITTLLPKMIARINDWFEEVKAKRGKRPTAFQFLQEIKPEAVAYITIKTTLACLTSADNTTVQAVASAIGRAIEDEARFGRIRDLEAKHFKKNVEEQLNVGHVYKKAFMQVVEADMLSKGLLGGEAWSSWHKEDSIHVGVRCIEMLIESTGMVSLHRQNAGVVGQDSETIELAPEYAEAIATRAGALAGISPMFQPCVVPPKPWTGITGGGYWANGRRPLALVRTHSKKALMRYEDVYMPEVYKAINIAQNTAWKINKKVLAVANVITKWKHCPVEDIPAIEREELPMKPEDIDMNPEALTAWKRAAAAVYRKDKARKSRRISLEFMLEQANKFANHKAIWFPYNMDWRGRVYAVSMFNPQGNDMTKGLLTLAKGKPIGKEGYYWLKIHGANCAGVDKVPFPERIKFIEENHENIMACAKSPLENTWWAEQDSPFCFLAFCFEYAGVQHHGLSYNCSLPLAFDGSCSGIQHFSAMLRDEVGGRAVNLLPSETVQDIYGIVAKKVNEILQADAINGTDNEVVTVTDENTGEISEKVKLGTKALAGQWLAYGVTRSVTKRSVMTLAYGSKEFGFRQQVLEDTIQPAIDSGKGLMFTQPNQAAGYMAKLIWESVSVTVVAAVEAMNWLKSAAKLLAAEVKDKKTGEILRKRCAVHWVTPDGFPVWQEYKKPIQTRLNLMFLGQFRLQPTINTNKDSEIDAHKQESGIAPNFVHSQDGSHLRKTVVWAHEKYGIESFALIHDSFGTIPADAANLFKAVRETMVDTYESCDVLADFYDQFADQLHESQLDKMPALPAKGNLNLRDILESDYAFA

SEQ ID NO: 39 - protein, 881 aa, synthetic construct
MNTINIAKNDFSDIELAAIPFNTLADHYGERLAREQLALEHESYEMGEARFRKMFERQLKAGEVADNAAAKPLITTLLPKMIARINDWFEEVKAKRGKRPTAFQFLQEIKPEAVAYITIKTTLACLTSADNTTVQAVASAIGRAIEDEARFGRIRDLEAKHFKKNVEEQLNVGHVHKKAFMQVVEADMLSKGLLGGEAWSSWHKEDSIHVGVRCIEMLIESTGMVSLHRQNAGVVGQDSETIELAPEYAEAIATRAGALAGISPMFQPCVVPPKPWTGITGGGYWANGRRPLALVRTHSKKALMRYEDVYMPEVYKAINIAQNTAWKINKKVLAVANVITKWKHCPVEDIPAIEREELPMKPEDIDMNPEALTAWKRAAAAVYRKDKARKSRRISLEFMLEQANKFANHKAIWFPYNMDWRGRVYAVSMFNPQGNDMTKGLLTLAKGKPIGKEGYYWLKIHGANCAGVDKVPFPERIKFIEENHENIMACAKSPLENTWWAEQDSPFCFLAFCFEYAGVQHHGLSYNCSLPLAFDGSCSGIQHFSAMLRDEVGGRAVNLLPSETVQDIYGIVAKKVNEILQADAINGTDNEVVTVTDENTGEISEKVKLGTKALAGQWLAYGVTRSVTKRSVMTLAYGSKEFGFRQQVLEDTIQPAIDSGKGLMFTQPNQAAGYMAKLIWESVSVTVVAAVEAMNWLKSAAKLLAAEVKDKKTGEILRKRCAVHWVTPDGFPVWQEYKKPIQTRLNLMFLGQFRLQPTINTNKDSEIDAHKQESGIAPNFVHSQDGSHLRKTVVWAHEKYGIESFALIHDSFGTIPADAANLFKAVRETMVDTYESCDVLADFYDQFADQLHESQLDKMPALPAKGNLNLRDILESDFAFA

SEQ ID NO: 40 - protein, 881 aa, synthetic construct
MNTINIAKNDFSDIELAAIPFNTLADHYGERLAREQLALEHESYEMGEARFRKMFERQLKAGEVADNAAAKPLITTLLPKMIARINDWFEEVKAKRGKRPTAFQFLQEIKPEAVAYITIKTTLACLTSAENTTVQAVASAIGRAIEDEARFGRIRDLEAKHFKKNVEEQLNVGHVYKKAFMQVVEADMLSKGLLGGEAWSSWHKEDSIHVGVRCIEMLIESTGMVSLHRQNAGVVGQDSETIELAPEYAEAIATRAGALAGISPMFQPCVVPPKPWTGITGGGYWANGRRPLALVRTHSKKALMRYEDVYMPEVYKAINIAQNTAWKINKKVLAVANVITKWKHCPVEDIPAIEREELPMKPEDIDMNPEALTAWKRAAAAVYRKDKARKSRRISLEFMLEQANKFANHKAIWFPYNMDWRGRVYAVSMFNPQGNDMTKGLLTLAKGKPIGKEGYYWLKIHGANCAGVDKVPFPERIKFIEENHENIMACAKSPLENTWWAEQDSPFCFLAFCFEYAGVQHHGLSYNCSLPLAFDGSCSGIQHFSAMLRDEVGGRAVNLLPSETVQDIYGIVAKKVNEILQADAINGTDNEVVTVTDENTGEISEKVKLGTKALAGQWLAYGVTRSVTKRSVMTLAYGSKEFGFRQQVLEDTIQPAIDSGKGLMFTQPNQAAGYMAKLIWESVSVTVVAAVEAMNWLKSAAKLLAAEVKDKKTGEILRKRCAVHWVTPDGFPVWQEYKKPIQTRLNLMFLGQFRLQPTINTNKDSEIDAHKQESGIAPNFVHSQDGSHLRKTVVWAHEKYGIESFALIHDSFGTIPADAANLFKAVRETMVDTYESCDVLADFYDQFADQLHESQLDKMPALPAKGNLNLRDILESDFAFA

SEQ ID NO: 41 - protein, 882 aa, synthetic construct
MNTINIAKNDFSDIELAAIPFNTLADHYGERLAREQLALEHESYEMGEARFRKMFERQLKAGEVADNAAAKPLITTLLPKMIARINDWFEEVKAKRGKRPTAFQFLQEIKPEAVAYITIKTTLACLTSADNTTVQAVASAIGRAIEDEARFGRIRDLEAKHFKKNVEEQLNAVGHVYKKAFMQVVEADMLSKGLLGGEAWSSWHKEDSIHVGVRCIEMLIESTGMVSLHRQNAGVVGQDSETIELAPEYAEAIATRAGALAGISPMFQPCVVPPKPWTGITGGGYWANGRRPLALVRTHSKKALMRYEDVYMPEVYKAINIAQNTAWKINKKVLAVANVITKWKHCPVEDIPAIEREELPMKPEDIDMNPEALTAWKRAAAAVYRKDKARKSRRISLEFMLEQANKFANHKAIWFPYNMDWRGRVYAVSMFNPQGNDMTKGLLTLAKGKPIGKEGYYWLKIHGANCAGVDKVPFPERIKFIEENHENIMACAKSPLENTWWAEQDSPFCFLAFCFEYAGVQHHGLSYNCSLPLAFDGSCSGIQHFSAMLRDEVGGRAVNLLPSETVQDIYGIVAKKVNEILQADAINGTDNEVVTVTDENTGEISEKVKLGTKALAGQWLAYGVTRSVTKRSVMTLAYGSKEFGFRQQVLEDTIQPAIDSGKGLMFTQPNQAAGYMAKLIWESVSVTVVAAVEAMNWLKSAAKLLAAEVKDKKTGEILRKRCAVHWVTPDGFPVWQEYKKPIQTRLNLMFLGQFRLQPTINTNKDSEIDAHKQESGIAPNFVHSQDGSHLRKTVVWAHEKYGIESFALIHDSFGTIPADAANLFKAVRETMVDTYESCDVLADFYDQFADQLHESQLDKMPALPAKGNLNLRDILESDFAFA

SEQ ID NO: 42 - protein, 882 aa, synthetic construct
MNTINIAKNDFSDIELAAIPFNTLADHYGERLAREQLALEHESYEMGEARFRKMFERQLKAGEVADNAAAKPLITTLLPKMIARINDWFEEVKAKRGKRPTAFQFLQEIKPEAVAYITIKTTLACLTSADNTTVQAVASAIGRAIEDEARFGRIRDLEAKHFKKNVEEQLNCVGHVYKKAFMQVVEADMLSKGLLGGEAWSSWHKEDSIHVGVRCIEMLIESTGMVSLHRQNAGVVGQDSETIELAPEYAEAIATRAGALAGISPMFQPCVVPPKPWTGITGGGYWANGRRPLALVRTHSKKALMRYEDVYMPEVYKAINIAQNTAWKINKKVLAVANVITKWKHCPVEDIPAIEREELPMKPEDIDMNPEALTAWKRAAAAVYRKDKARKSRRISLEFMLEQANKFANHKAIWFPYNMDWRGRVYAVSMFNPQGNDMTKGLLTLAKGKPIGKEGYYWLKIHGANCAGVDKVPFPERIKFIEENHENIMACAKSPLENTWWAEQDSPFCFLAFCFEYAGVQHHGLSYNCSLPLAFDGSCSGIQHFSAMLRDEVGGRAVNLLPSETVQDIYGIVAKKVNEILQADAINGTDNEVVTVTDENTGEISEKVKLGTKALAGQWLAYGVTRSVTKRSVMTLAYGSKEFGFRQQVLEDTIQPAIDSGKGLMFTQPNQAAGYMAKLIWESVSVTVVAAVEAMNWLKSAAKLLAAEVKDKKTGEILRKRCAVHWVTPDGFPVWQEYKKPIQTRLNLMFLGQFRLQPTINTNKDSEIDAHKQESGIAPNFVHSQDGSHLRKTVVWAHEKYGIESFALIHDSFGTIPADAANLFKAVRETMVDTYESCDVLADFYDQFADQLHESQLDKMPALPAKGNLNLRDILESDFAFA

SEQ ID NO: 43 - protein, 882 aa, synthetic construct
MNTINIAKNDFSDIELAAIPFNTLADHYGERLAREQLALEHESYEMGEARFRKMFERQLKAGEVADNAAAKPLITTLLPKMIARINDWFEEVKAKRGKRPTAFQFLQEIKPEAVAYITIKTTLACLTSADNTTVQAVASAIGRAIEDEARFGRIRDLEAKHFKKNVEEQLNGVGHVYKKAFMQVVEADMLSKGLLGGEAWSSWHKEDSIHVGVRCIEMLIESTGMVSLHRQNAGVVGQDSETIELAPEYAEAIATRAGALAGISPMFQPCVVPPKPWTGITGGGYWANGRRPLALVRTHSKKALMRYEDVYMPEVYKAINIAQNTAWKINKKVLAVANVITKWKHCPVEDIPAIEREELPMKPEDIDMNPEALTAWKRAAAAVYRKDKARKSRRISLEFMLEQANKFANHKAIWFPYNMDWRGRVYAVSMFNPQGNDMTKGLLTLAKGKPIGKEGYYWLKIHGANCAGVDKVPFPERIKFIEENHENIMACAKSPLENTWWAEQDSPFCFLAFCFEYAGVQHHGLSYNCSLPLAFDGSCSGIQHFSAMLRDEVGGRAVNLLPSETVQDIYGIVAKKVNEILQADAINGTDNEVVTVTDENTGEISEKVKLGTKALAGQWLAYGVTRSVTKRSVMTLAYGSKEFGFRQQVLEDTIQPAIDSGKGLMFTQPNQAAGYMAKLIWESVSVTVVAAVEAMNWLKSAAKLLAAEVKDKKTGEILRKRCAVHWVTPDGFPVWQEYKKPIQTRLNLMFLGQFRLQPTINTNKDSEIDAHKQESGIAPNFVHSQDGSHLRKTVVWAHEKYGIESFALIHDSFGTIPADAANLFKAVRETMVDTYESCDVLADFYDQFADQLHESQLDKMPALPAKGNLNLRDILESDFAFA

SEQ ID NO: 44 - protein, 882 aa, synthetic construct
MNTINIAKNDFSDIELAAIPFNTLADHYGERLAREQLALEHESYEMGEARFRKMFERQLKAGEVADNAAAKPLITTLLPKMIARINDWFEEVKAKRGKRPTAFQFLQEIKPEAVAYITIKTTLACLTSAENTTVQAVASAIGRAIEDEARFGRIRDLEAKHFKKNVEEQLNRVGHVYKKAFMQVVEADMLSKGLLGGEAWSSWHKEDSIHVGVRCIEMLIESTGMVSLHRQNAGVVGQDSETIELAPEYAEAIATRAGALAGISPMFQPCVVPPKPWTGITGGGYWANGRRPLALVRTHSKKALMRYEDVYMPEVYKAINIAQNTAWKINKKVLAVANVITKWKHCPVEDIPAIEREELPMKPEDIDMNPEALTAWKRAAAAVYRKDKARKSRRISLEFMLEQANKFANHKAIWFPYNMDWRGRVYAVSMFNPQGNDMTKGLLTLAKGKPIGKEGYYWLKIHGANCAGVDKVPFPERIKFIEENHENIMACAKSPLENTWWAEQDSPFCFLAFCFEYAGVQHHGLSYNCSLPLAFDGSCSGIQHFSAMLRDEVGGRAVNLLPSETVQDIYGIVAKKVNEILQADAINGTDNEVVTVTDENTGEISEKVKLGTKALAGQWLAYGVTRSVTKRSVMTLAYGSKEFGFRQQVLEDTIQPAIDSGKGLMFTQPNQAAGYMAKLIWESVSVTVVAAVEAMNWLKSAAKLLAAEVKDKKTGEILRKRCAVHWVTPDGFPVWQEYKKPIQTRLNLMFLGQFRLQPTINTNKDSEIDAHKQESGIAPNFVHSQDGSHLRKTVVWAHEKYGIESFALIHDSFGTIPADAANLFKAVRETMVDTYESCDVLADFYDQFADQLHESQLDKMPALPAKGNLNLRDILESDFAFA

SEQ ID NO: 45 - protein, 882 aa, synthetic construct
MNTINIAKNDFSDIELAAIPFNTLADHYGERLAREQLALEHESYEMGEARFRKMFERQLKAGEVADNAAAKPLITTLLPKMIARINDWFEEVKAKRGKRPTAFQFLQEIKPEAVAYITIKTTLACLTSADNTTVQAVASAIGRAIEDEARFGRIRDLEAKHFKKNVEEQLNRVGHVYKKAFMQVVEADMLSKGLLGGEAWSSWHKEDSIHVGVRCIEMLIESTGMVSLHRQNAGVVGQDSETIELAPEYAEAIATRAGALAGISPMFQPCVVPPKPWTGITGGGYWANGRRPLALVRTHSKKALMRYEDVYMPEVYKAINIAQNTAWKINKKVLAVANVITKWKHCPVEDIPAIEREELPMKPEDIDMNPEALTAWKRAAAAVYRSDKARKSRRISLEFMLEQANKFANHKAIWFPYNMDWRGRVYAVSMFNPQGNDMTKGLLTLAKGKPIGKEGYYWLKIHGANCAGVDKVPFPERIKFIEENHENIMACAKSPLENTWWAEQDSPFCFLAFCFEYAGVQHHGLSYNCSLPLAFDGSCSGIQHFSAMLRDEVGGRAVNLLPSETVQDIYGIVAKKVNEILQADAINGTDNEVVTVTDENTGEISEKVKLGTKALAGQWLAYGVTRSVTKRSVMTLAYGSKEFGFRQQVLEDTIQPAIDSGKGLMFTQPNQAAGYMAKLIWESVSVTVVAAVEAMNWLKSAAKLLAAEVKDKKTGEILRKRCAVHWVTPDGFPVWQEYKKPIQTRLNLMFLGQFRLQPTINTNKDSEIDAHKQESGIAPNFVHSQDGSHLRKTVVWAHEKYGIESFALIHDSFGTIPADAANLFKAVRETMVDTYESCDVLADFYDQFADQLHESQLDKMPALPAKGNLNLRDILESDFAFA

SEQ ID NO: 46 - protein, 882 aa, synthetic construct
MNTINIAKNDFSDIELAAIPFNTLADHYGERLAREQLALEHESYEMGEARFRKMFERQLKAGEVADNAAAKPLITTLLPKMIARINDWFEEVKAKRGKRPTAFQFLQEIKPEAVAYITIKTTLACLTSADNTTVQAVASAIGRAIEDEARFGRIRDLEAKHFKKNVEEQLNRVGHVYKKAFMQVVEADMLSKGLLGGEAWSSWHKEDSIHVGVRCIEMLIESTGMVSLHRQNAGVVGQDSETIELAPEYAEAIATRAGALAGISPMFQPCVVPPKPWTGITGGGYWANGRRPLALVRTHSKKALMRYEDVYMPEVYKAINIAQNTAWKINKKVLAVANVITKWKHCPVEDIPAIEREELPMKPEDIDMNPEALTAWKRAAAAVYRYDKARKSRRISLEFMLEQANKFANHKAIWFPYNMDWRGRVYAVSMFNPQGNDMTKGLLTLAKGKPIGKEGYYWLKIHGANCAGVDKVPFPERIKFIEENHENIMACAKSPLENTWWAEQDSPFCFLAFCFEYAGVQHHGLSYNCSLPLAFDGSCSGIQHFSAMLRDEVGGRAVNLLPSETVQDIYGIVAKKVNEILQADAINGTDNEVVTVTDENTGEISEKVKLGTKALAGQWLAYGVTRSVTKRSVMTLAYGSKEFGFRQQVLEDTIQPAIDSGKGLMFTQPNQAAGYMAKLIWESVSVTVVAAVEAMNWLKSAAKLLAAEVKDKKTGEILRKRCAVHWVTPDGFPVWQEYKKPIQTRLNLMFLGQFRLQPTINTNKDSEIDAHKQESGIAPNFVHSQDGSHLRKTVVWAHEKYGIESFALIHDSFGTIPADAANLFKAVRETMVDTYESCDVLADFYDQFADQLHESQLDKMPALPAKGNLNLRDILESDFAFA

SEQ ID NO: 47 - protein, 882 aa, synthetic construct
MNTINIAKNDFSDIELAAIPFNTLADHYGERLAREQLALEHESYEMGEARFRKMFERQLKAGEVADNAAAKPLITTLLPKMIARINDWFEEVKAKRGKRPTAFQFLQEIKPEAVAYITIKTTLACLTSADNTTVQAVASAIGRAIEDEARFGRIRDLEAKHFKKNVEEQLNRVGHVYKKAFMQVVEADMLSKGLLGGEAWSSWHKEDSIHVGVRCIEMLIESTGMVSLHRQNAGVVGQDSETIELAPEYAEAIATRAGALAGISPMFQPCVVPPKPWTGITGGGYWANGRRPLALVRTHSKKALMRYEDVYMPEVYKAINIAQNTAWKINKKVLAVANVITKWKHCPVEDIPAIEREELPMKPEDIDMNPEALTAWKRAAAAVYRKDKARKSRRISLEFMLEQANKFANHKAIWFPYNMDWRGRVYAVSMFNPQGNDMTKGLLTLAKGKPIGKEGYYWLKIHGANCAGVDKVPFPERIKFIEENHENIMACAKSPLENTWWAEQDSPFCFLAFCFEYAGVQHHGLSYNCSLPLAFDGSCSGIQHFSAMLRDEVGGRAVNLLPSETVQDIYGIVAKKVNEILQADAINGTDNEVVTVTDENTGEISEKVKLGTKALAGQWLAYGVTRSVTKRSVMTLAYGSKEFGFRQQVLEDTIQPAIDSGKGLMFTQPNQAAGYMAKLIWESVSVTVVAAVEAMNWLKSAAKLLAAEVKDKKTGEILRKRCAVHWVTPDGFPVWQEYKKPIQTRLNLMFLGQFRLQPTINTNKDSEIDAHKQESGIAPNFVHSQDGSHLRKTVVWAHEKYGIESFALIHDSFGTIPADAANLFKAVRETMVDTYESCDVLADFYDQFADQLHESQLDKMPALPAKGNLNLRDILESDAAFA

SEQ ID NO: 48 - protein, 883 aa, synthetic construct
MNTINIAKNDFSDIELAAIPFNTLADHYGERLAREQLALEHESYEMGEARFRKMFERQLKAGEVADNAAAKPLITTLLPKMIARINDWFEEVKAKRGKRPTAFQFLQEIKPEAVAYITIKTTLACLTSADNTTVQAVASAIGRAIEDEARFGRIRDLEAKHFKKNVEEQLNKRVGHVYKKAFMQVVEADMLSKGLLGGEAWSSWHKEDSIHVGVRCIEMLIESTGMVSLHRQNAGVVGQDSETIELAPEYAEAIATRAGALAGISPMFQPCVVPPKPWTGITGGGYWANGRRPLALVATHSKKALMRYEDVYMPEVYKAINIAQNTAWKINKKVLAVANVITKWKHCPVEDIPAIEREELPMKPEDIDMNPEALTAWKRAAAAVYRKDKARKSRRISLEFMLEQANKFANHKAIWFPYNMDWRGRVYAVSMFNPQGNDMTKGLLTLAKGKPIGKEGYYWLKIHGANCAGVDKVPFPERIKFIEENHENIMACAKSPLENTWWAEQDSPFCFLAFCFEYAGVQHHGLSYNCSLPLAFDGSCSGIQHFSAMLRDEVGGRAVNLLPSETVQDIYGIVAKKVNEILQADAINGTDNEVVTVTDENTGEISEKVKLGTKALAGQWLAYGVTRSVTKRSVMTLAYGSKEFGFRQQVLEDTIQPAIDSGKGLMFTQPNQAAGYMAKLIWESVSVTVVAAVEAMNWLKSAAKLLAAEVKDKKTGEILRKRCAVHWVTPDGFPVWQEYKKPIQTRLNLMFLGQFRLQPTINTNKDSEIDAHKQESGIAPNFVHSQDGSHLRKTVVWAHEKYGIESFALIHDSFGTIPADAANLFKAVRETMVDTYESCDVLADFYDQFADQLHESQLDKMPALPAKGNLNLRDILESDFAFA

SEQ ID NO: 49 - protein, 883 aa, synthetic construct
MNTINIAKNDFSDIELAAIPFNTLADHYGERLAREQLALEHESYEMGEARFRKMFERQLKAGEVADNAAAKPLITTLLPKMIARINDWFEEVKAKRGKRPTAFQFLQEIKPEAVAYITIKTTLACLTSADNTTVQAVASAIGRAIEDEARFGRIRDLEAKHFKKNVEEQLNKRVGHVYKKAFMQVVEADMLSKGLLGGEAWSSWHKEDSIHVGVRCIEMLIESTGMVSLHRQNAGVVGQDSETIELAPEYAEAIATRAGALAGISPMFQPCVVPPKPWTGITGGGYWANGRRPLALVRTHSKKALMRYEDVYMPEVYKAINIAQNTAWKINKKVLAVANVITKWKHCPVEDIPAIEREELPMKPEDIDMNPEALTAWKRAAAAVERKDKARKSRRISLEFMLEQANKFANHKAIWFPYNMDWRGRVYAVSMFNPQGNDMTKGLLTLAKGKPIGKEGYYWLKIHGANCAGVDKVPFPERIKFIEENHENIMACAKSPLENTWWAEQDSPFCFLAFCFEYAGVQHHGLSYNCSLPLAFDGSCSGIQHFSAMLRDEVGGRAVNLLPSETVQDIYGIVAKKVNEILQADAINGTDNEVVTVTDENTGEISEKVKLGTKALAGQWLAYGVTRSVTKRSVMTLAYGSKEFGFRQQVLEDTIQPAIDSGKGLMFTQPNQAAGYMAKLIWESVSVTVVAAVEAMNWLKSAAKLLAAEVKDKKTGEILRKRCAVHWVTPDGFPVWQEYKKPIQTRLNLMFLGQFRLQPTINTNKDSEIDAHKQESGIAPNFVHSQDGSHLRKTVVWAHEKYGIESFALIHDSFGTIPADAANLFKAVRETMVDTYESCDVLADFYDQFADQLHESQLDKMPALPAKGNLNLRDILESDFAFA

SEQ ID NO: 50 - protein, 883 aa, synthetic construct
MNTINIAKNDFSDIELAAIPFNTLADHYGERLAREQLALEHESYEMGEARFRKMFERQLKAGEVADNAAAKPLITTLLPKMIARINDWFEEVKAKRGKRPTAFQFLQEIKPEAVAYITIKTTLACLTSADNTTVQAVASAIGRAIEDEARFGRIRDLEAKHFKKNVEEQLNKRVGHVYKKAFMQVVEADMLSKGLLGGEAWSSWHKEDSIHVGVRCIEMLIESTGMVSLHRQNAGVVGQDSETIELAPEYAEAIATRAGALAGISPMFQPCVVPPKPWTGITGGGYWANGRRPLALVRTHSKKALMRYEDVYMPEVYKAINIAQNTAWKINKKVLAVANVITKWKHCPVEDIPAIEREELPMKPEDIDMNPEALTAWKRAAAAVYRQDKARKSRRISLEFMLEQANKFANHKAIWFPYNMDWRGRVYAVSMFNPQGNDMTKGLLTLAKGKPIGKEGYYWLKIHGANCAGVDKVPFPERIKFIEENHENIMACAKSPLENTWWAEQDSPFCFLAFCFEYAGVQHHGLSYNCSLPLAFDGSCSGIQHFSAMLRDEVGGRAVNLLPSETVQDIYGIVAKKVNEILQADAINGTDNEVVTVTDENTGEISEKVKLGTKALAGQWLAYGVTRSVTKRSVMTLAYGSKEFGFRQQVLEDTIQPAIDSGKGLMFTQPNQAAGYMAKLIWESVSVTVVAAVEAMNWLKSAAKLLAAEVKDKKTGEILRKRCAVHWVTPDGFPVWQEYKKPIQTRLNLMFLGQFRLQPTINTNKDSEIDAHKQESGIAPNFVHSQDGSHLRKTVVWAHEKYGIESFALIHDSFGTIPADAANLFKAVRETMVDTYESCDVLADFYDQFADQLHESQLDKMPALPAKGNLNLRDILESDFAFA

SEQ ID NO: 51 - protein, 883 aa, synthetic construct
MNTINIAKNDFSDIELAAIPFNTLADHYGERLAREQLALEHESYEMGEARFRKMFERQLKAGEVADNAAAKPLITTLLPKMIARINDWFEEVKAKRGKRPTAFQFLQEIKPEAVAYITIKTTLACLTSADNTTVQAVASAIGRAIEDEARFGRIRDLEAKHFKKNVEEQLNKRVGHVYKKAFMQVVEADMLSKGLLGGEAWSSWHKEDSIHVGVRCIEMLIESTGMVSLHRQNAGVVGQDSETIELAPEYAEAIATRAGALAGISPMFQPCVVPPKPWTGITGGGYWANGRRPLALVRTHSKKALMRYEDVYMPEVYKAINIAQNTAWKINKKVLAVANVITKWKHCPVEDIPAIEREELPMKPEDIDMNPEALTAWKRAAAAVYRYDKARKSRRISLEFMLEQANKFANHKAIWFPYNMDWRGRVYAVSMFNPQGNDMTKGLLTLAKGKPIGKEGYYWLKIHGANCAGVDKVPFPERIKFIEENHENIMACAKSPLENTWWAEQDSPFCFLAFCFEYAGVQHHGLSYNCSLPLAFDGSCSGIQHFSAMLRDEVGGRAVNLLPSETVQDIYGIVAKKVNEILQADAINGTDNEVVTVTDENTGEISEKVKLGTKALAGQWLAYGVTRSVTKRSVMTLAYGSKEFGFRQQVLEDTIQPAIDSGKGLMFTQPNQAAGYMAKLIWESVSVTVVAAVEAMNWLKSAAKLLAAEVKDKKTGEILRKRCAVHWVTPDGFPVWQEYKKPIQTRLNLMFLGQFRLQPTINTNKDSEIDAHKQESGIAPNFVHSQDGSHLRKTVVWAHEKYGIESFALIHDSFGTIPADAANLFKAVRETMVDTYESCDVLADFYDQFADQLHESQLDKMPALPAKGNLNLRDILESDFAFA

SEQ ID NO: 52 - protein, 883 aa, synthetic construct
MNTINIAKNDFSDIELAAIPFNTLADHYGERLAREQLALEHESYEMGEARFRKMFERQLKAGEVADNAAAKPLITTLLPKMIARINDWFEEVKAKRGKRPTAFQFLQEIKPEAVAYITIKTTLACLTSADNTTVQAVASAIGRAIEDEARFGRIRDLEAKHFKKNVEEQLNKRVGHVYKKAFMQVVEADMLSKGLLGGEAWSSWHKEDSIHVGVRCIEMLIESTGMVSLHRQNAGVVGQDSETIELAPEYAEAIATRAGALAGISPMFQPCVVPPKPWTGITGGGYWANGRRPLALVRTHSKKALMRYEDVYMPEVYKAINIAQNTAWKINKKVLAVANVITKWKHCPVEDIPAIEREELPMKPEDIDMNPEALTAWKRAAAAVYRSDKARKSRRISLEFMLEQANKFANHKAIWFPYNMDWRGRVYAVSMFNPQGNDMTKGLLTLAKGKPIGKEGYYWLKIHGANCAGVDKVPFPERIKFIEENHENIMACAKSPLENTWWAEQDSPFCFLAFCFEYAGVQHHGLSYNCSLPLAFDGSCSGIQHFSAMLRDEVGGRAVNLLPSETVQDIYGIVAKKVNEILQADAINGTDNEVVTVTDENTGEISEKVKLGTKALAGQWLAYGVTRSVTKRSVMTLAYGSKEFGFRQQVLEDTIQPAIDSGKGLMFTQPNQAAGYMAKLIWESVSVTVVAAVEAMNWLKSAAKLLAAEVKDKKTGEILRKRCAVHWVTPDGFPVWQEYKKPIQTRLNLMFLGQFRLQPTINTNKDSEIDAHKQESGIAPNFVHSQDGSHLRKTVVWAHEKYGIESFALIHDSFGTIPADAANLFKAVRETMVDTYESCDVLADFYDQFADQLHESQLDKMPALPAKGNLNLRDILESDFAFA

SEQ ID NO: 53 - protein, 883 aa, synthetic construct
MNTINIAKNDFSDIELAAIPFNTLADHYGERLAREQLALEHESYEMGEARFRKMFERQLKAGEVADNAAAKPLITTLLPKMIARINDWFEEVKAKRGKRPTAFQFLQEIKPEAVAYITIKTTLACLTSADNTTVQAVASAIGRAIEDEARFGRIRDLEAKHFKKNVEEQLNKRVGHVYKKAFMQVVEADMLSKGLLGGEAWSSWHKEDSIHVGVRCIEMLIESTGMVSLHRQNAGVVGQDSETIELAPEYAEAIATRAGALAGISPMFQPCVVPPKPWTGITGGGYWANGRRPLALVRTHSKKALMRYEDVYMPEVYKAINIAQNTAWKINKKVLAVANVITKWKHCPVEDIPAIEREELPMKPEDIDMNPEALTAWKRAAAAVYRKLKARKSRRISLEFMLEQANKFANHKAIWFPYNMDWRGRVYAVSMFNPQGNDMTKGLLTLAKGKPIGKEGYYWLKIHGANCAGVDKVPFPERIKFIEENHENIMACAKSPLENTWWAEQDSPFCFLAFCFEYAGVQHHGLSYNCSLPLAFDGSCSGIQHFSAMLRDEVGGRAVNLLPSETVQDIYGIVAKKVNEILQADAINGTDNEVVTVTDENTGEISEKVKLGTKALAGQWLAYGVTRSVTKRSVMTLAYGSKEFGFRQQVLEDTIQPAIDSGKGLMFTQPNQAAGYMAKLIWESVSVTVVAAVEAMNWLKSAAKLLAAEVKDKKTGEILRKRCAVHWVTPDGFPVWQEYKKPIQTRLNLMFLGQFRLQPTINTNKDSEIDAHKQESGIAPNFVHSQDGSHLRKTVVWAHEKYGIESFALIHDSFGTIPADAANLFKAVRETMVDTYESCDVLADFYDQFADQLHESQLDKMPALPAKGNLNLRDILESDFAFA

SEQ ID NO: 54 - protein, 883 aa, synthetic construct
MNTINIAKNDFSDIELAAIPFNTLADHYGERLAREQLALEHESYEMGEARFRKMFERQLKAGEVADNAAAKPLITTLLPKMIARINDWFEEVKAKRGKRPTAFQFLQEIKPEAVAYITIKTTLACLTSAENTTVQAVASAIGRAIEDEARFGRIRDLEAKHFKKNVEEQLNAGVGHVHKKAFMQVVEADMLSKGLLGGEAWSSWHKEDSIHVGVRCIEMLIESTGMVSLHRQNAGVVGQDSETIELAPEYAEAIATRAGALAGISPMFQPCVVPPKPWTGITGGGYWANGRRPLALVRTHSKKALMRYEDVYMPEVYKAINIAQNTAWKINKKVLAVANVITKWKHCPVEDIPAIEREELPMKPEDIDMNPEALTAWKRAAAAVYRKGKARKSRRISLEFMLEQANKFANHKAIWFPYNMDWRGRVYAVSMFNPQGNDMTKGLLTLAKGKPIGKEGYYWLKIHGANCAGVDKVPFPERIKFIEENHENIMACAKSPLENTWWAEQDSPFCFLAFCFEYAGVQHHGLSYNCSLPLAFDGSCSGIQHFSAMLRDEVGGRAVNLLPSETVQDIYGIVAKKVNEILQADAINGTDNEVVTVTDENTGEISEKVKLGTKALAGQWLAYGVTRSVTKRSVMTLAYGSKEFGFRQQVLEDTIQPAIDSGKGLMFTQPNQAAGYMAKLIWESVSVTVVAAVEAMNWLKSAAKLLAAEVKDKKTGEILRKRCAVHWVTPDGFPVWQEYKKPIQTRLNLMFLGQFRLQPTINTNKDSEIDAHKQESGIAPNFVHSQDGSHLRKTVVWAHEKYGIESFALIHDSFGTIPADAANLFKAVRETMVDTYESCDVLADFYDQFADQLHESQLDKMPALPAKGNLNLRDILESDFAFA

SEQ ID NO: 55 - protein, 883 aa, synthetic construct
MNTINIAKNDFSDIELAAIPFNTLADHYGERLAREQLALEHESYEMGEARFRKMFERQLKAGEVADNAAAKPLITTLLPKMIARINDWFEEVKAKRGKRPTAFQFLQEIKPEAVAYITIKTTLACLTSAENTTVQAVASAIGRAIEDEARFGRIRDLEAKHFKKNVEEQLNKGVGHVYKKAFMQVVEADMLSKGLLGGEAWSSWHKEDSIHVGVRCIEMLIESTGMVSLHRQNAGVVGQDSETIELAPEYAEAIATRAGALAGISPMFQPCVVPPKPWTGITGGGYWANGRRPLALVRTHSKKALMRYEDVYMPEVYKAINIAQNTAWKINKKVLAVANVITKWKHCPVEDIPAIEREELPMKPEDIDMNPEALTAWKRAAAAVYRKDKARKSRRISLEFMLEQANKFANHKAIWFPYNMDWRGRVYAVSMFNPQGNDMTKGLLTLAKGKPIGKEGYYWLKIHGANCAGVDKVPFPERIKFIEENHENIMACAKSPLENTWWAEQDSPFCFLAFCFEYAGVQHHGLSYNCSLPLAFDGSCSGIQHFSAMLRDEVGGRAVNLLPSETVQDIYGIVAKKVNEILQADAINGTDNEVVTVTDENTGEISEKVKLGTKALAGQWLAYGVTRSVTKRSVMTLAYGSKEFGFRQQVLEDTIQPAIDSGKGLMFTQPNQAAGYMAKLIWESVSVTVVAAVEAMNWLKSAAKLLAAEVKDKKTGEILRKRCAVHWVTPDGFPVWQEYKKPIQTRLNLMFLGQFRLQPTINTNKDSEIDAHKQESGIAPNFVHSQDGSHLRKTVVWAHEKYGIESFALIHDSFGTIPADAANLFKAVRETMVDTYESCDVLADFYDQFADQLHESQLDKMPALPAKGNLNLRDILESDFAFA

SEQ ID NO: 56 - protein, 883 aa, synthetic construct
MNTINIAKNDFSDIELAAIPFNTLADHYGERLAREQLALEHESYEMGEARFRKMFERQLKAGEVADNAAAKPLITTLLPKMIARINDWFEEVKAKRGKRPTAFQFLQEIKPEAVAYITIKTTLACLTSAENTTVQAVASAIGRAIEDEARFGRIRDLEAKHFKKNVEEQLNGRVGHVHKKAFMQVVEADMLSKGLLGGEAWSSWHKEDSIHVGVRCIEMLIESTGMVSLHRQNAGVVGQDSETIELAPEYAEAIATRAGALAGISPMFQPCVVPPKPWTGITGGGYWANGRRPLALVRTHSKKALMRYEDVYMPEVYKAINIAQNTAWKINKKVLAVANVITKWKHCPVEDIPAIEREELPMKPEDIDMNPEALTAWKRAAAAVYRKGKARKSRRISLEFMLEQANKFANHKAIWFPYNMDWRGRVYAVSMFNPQGNDMTKGLLTLAKGKPIGKEGYYWLKIHGANCAGVDKVPFPERIKFIEENHENIMACAKSPLENTWWAEQDSPFCFLAFCFEYAGVQHHGLSYNCSLPLAFDGSCSGIQHFSAMLRDEVGGRAVNLLPSETVQDIYGIVAKKVNEILQADAINGTDNEVVTVTDENTGEISEKVKLGTKALAGQWLAYGVTRSVTKRSVMTLAYGSKEFGFRQQVLEDTIQPAIDSGKGLMFTQPNQAAGYMAKLIWESVSVTVVAAVEAMNWLKSAAKLLAAEVKDKKTGEILRKRCAVHWVTPDGFPVWQEYKKPIQTRLNLMFLGQFRLQPTINTNKDSEIDAHKQESGIAPNFVHSQDGSHLRKTVVWAHEKYGIESFALIHDSFGTIPADAANLFKAVRETMVDTYESCDVLADFYDQFADQLHESQLDKMPALPAKGNLNLRDILESDFAFA

SEQ ID NO: 57 - protein, 883 aa, synthetic construct
MNTINIAKNDFSDIELAAIPFNTLADHYGERLAREQLALEHESYEMGEARFRKMFERQLKAGEVADNAAAKPLITTLLPKMIARINDWFEEVKAKRGKRPTAFQFLQEIKPEAVAYITIKTTLACLTSADNTTVQAVASAIGRAIEDEARFGRIRDLEAKHFKKNVEEQLNACVGHVHKKAFMQVVEADMLSKGLLGGEAWSSWHKEDSIHVGVRCIEMLIESTGMVSLHRQNAGVVGQDSETIELAPEYAEAIATRAGALAGISPMFQPCVVPPKPWTGITGGGYWANGRRPLALVRTHSKKALMRYEDVYMPEVYKAINIAQNTAWKINKKVLAVANVITKWKHCPVEDIPAIEREELPMKPEDIDMNPEALTAWKRAAAAVYRKGKARKSRRISLEFMLEQANKFANHKAIWFPYNMDWRGRVYAVSMFNPQGNDMTKGLLTLAKGKPIGKEGYYWLKIHGANCAGVDKVPFPERIKFIEENHENIMACAKSPLENTWWAEQDSPFCFLAFCFEYAGVQHHGLSYNCSLPLAFDGSCSGIQHFSAMLRDEVGGRAVNLLPSETVQDIYGIVAKKVNEILQADAINGTDNEVVTVTDENTGEISEKVKLGTKALAGQWLAYGVTRSVTKRSVMTLAYGSKEFGFRQQVLEDTIQPAIDSGKGLMFTQPNQAAGYMAKLIWESVSVTVVAAVEAMNWLKSAAKLLAAEVKDKKTGEILRKRCAVHWVTPDGFPVWQEYKKPIQTRLNLMFLGQFRLQPTINTNKDSEIDAHKQESGIAPNFVHSQDGSHLRKTVVWAHEKYGIESFALIHDSFGTIPADAANLFKAVRETMVDTYESCDVLADFYDQFADQLHESQLDKMPALPAKGNLNLRDILESDFAFA

SEQ ID NO: 58 - protein, 883 aa, synthetic construct
MNTINIAKNDFSDIELAAIPFNTLADHYGERLAREQLALEHESYEMGEARFRKMFERQLKAGEVADNAAAKPLITTLLPKMIARINDWFEEVKAKRGKRPTAFQFLQEIKPEAVAYITIKTTLACLTSAENTTVQAVASAIGRAIEDEARFGRIRDLEAKHFKKNVEEQLNGCVGHVYKKAFMQVVEADMLSKGLLGGEAWSSWHKEDSIHVGVRCIEMLIESTGMVSLHRQNAGVVGQDSETIELAPEYAEAIATRAGALAGISPMFQPCVVPPKPWTGITGGGYWANGRRPLALVRTHSKKALMRYEDVYMPEVYKAINIAQNTAWKINKKVLAVANVITKWKHCPVEDIPAIEREELPMKPEDIDMNPEALTAWKRAAAAVYRKYKARKSRRISLEFMLEQANKFANHKAIWFPYNMDWRGRVYAVSMFNPQGNDMTKGLLTLAKGKPIGKEGYYWLKIHGANCAGVDKVPFPERIKFIEENHENIMACAKSPLENTWWAEQDSPFCFLAFCFEYAGVQHHGLSYNCSLPLAFDGSCSGIQHFSAMLRDEVGGRAVNLLPSETVQDIYGIVAKKVNEILQADAINGTDNEVVTVTDENTGEISEKVKLGTKALAGQWLAYGVTRSVTKRSVMTLAYGSKEFGFRQQVLEDTIQPAIDSGKGLMFTQPNQAAGYMAKLIWESVSVTVVAAVEAMNWLKSAAKLLAAEVKDKKTGEILRKRCAVHWVTPDGFPVWQEYKKPIQTRLNLMFLGQFRLQPTINTNKDSEIDAHKQESGIAPNFVHSQDGSHLRKTVVWAHEKYGIESFALIHDSFGTIPADAANLFKAVRETMVDTYESCDVLADFYDQFADQLHESQLDKMPALPAKGNLNLRDILESDFAFA

SEQ ID NO: 59 - protein, 883 aa, synthetic construct
MNTINIAKNDFSDIELAAIPFNTLADHYGERLAREQLALEHESYEMGEARFRKMFERQLKAGEVADNAAAKPLITTLLPKMIARINDWFEEVKAKRGKRPTAFQFLQEIKPEAVAYITIKTTLACLTSAENTTVQAVASAIGRAIEDEARFGRIRDLEAKHFKKNVEEQLNGGVGHVHKKAFMQVVEADMLSKGLLGGEAWSSWHKEDSIHVGVRCIEMLIESTGMVSLHRQNAGVVGQDSETIELAPEYAEAIATRAGALAGISPMFQPCVVPPKPWTGITGGGYWANGRRPLALVRTHSKKALMRYEDVYMPEVYKAINIAQNTAWKINKKVLAVANVITKWKHCPVEDIPAIEREELPMKPEDIDMNPEALTAWKRAAAAVYRKDKARKSRRISLEFMLEQANKFANHKAIWFPYNMDWRGRVYAVSMFNPQGNDMTKGLLTLAKGKPIGKEGYYWLKIHGANCAGVDKVPFPERIKFIEENHENIMACAKSPLENTWWAEQDSPFCFLAFCFEYAGVQHHGLSYNCSLPLAFDGSCSGIQHFSAMLRDEVGGRAVNLLPSETVQDIYGIVAKKVNEILQADAINGTDNEVVTVTDENTGEISEKVKLGTKALAGQWLAYGVTRSVTKRSVMTLAYGSKEFGFRQQVLEDTIQPAIDSGKGLMFTQPNQAAGYMAKLIWESVSVTVVAAVEAMNWLKSAAKLLAAEVKDKKTGEILRKRCAVHWVTPDGFPVWQEYKKPIQTRLNLMFLGQFRLQPTINTNKDSEIDAHKQESGIAPNFVHSQDGSHLRKTVVWAHEKYGIESFALIHDSFGTIPADAANLFKAVRETMVDTYESCDVLADFYDQFADQLHESQLDKMPALPAKGNLNLRDILESDFAFA

SEQ ID NO: 60 - protein, 883 aa, synthetic construct
MNTINIAKNDFSDIELAAIPFNTLADHYGERLAREQLALEHESYEMGEARFRKMFERQLKAGEVADNAAAKPLITTLLPKMIARINDWFEEVKAKRGKRPTAFQFLQEIKPEAVAYITIKTTLACLTSADNTTVQAVASAIGRAIEDEARFGRIRDLEAKHFKKNVEEQLNKAVGHVHKKAFMQVVEADMLSKGLLGGEAWSSWHKEDSIHVGVRCIEMLIESTGMVSLHRQNAGVVGQDSETIELAPEYAEAIATRAGALAGISPMFQPCVVPPKPWTGITGGGYWANGRRPLALVRTHSKKALMRYEDVYMPEVYKAINIAQNTAWKINKKVLAVANVITKWKHCPVEDIPAIEREELPMKPEDIDMNPEALTAWKRAAAAVYRKDKARKSRRISLEFMLEQANKFANHKAIWFPYNMDWRGRVYAVSMFNPQGNDMTKGLLTLAKGKPIGKEGYYWLKIHGANCAGVDKVPFPERIKFIEENHENIMACAKSPLENTWWAEQDSPFCFLAFCFEYAGVQHHGLSYNCSLPLAFDGSCSGIQHFSAMLRDEVGGRAVNLLPSETVQDIYGIVAKKVNEILQADAINGTDNEVVTVTDENTGEISEKVKLGTKALAGQWLAYGVTRSVTKRSVMTLAYGSKEFGFRQQVLEDTIQPAIDSGKGLMFTQPNQAAGYMAKLIWESVSVTVVAAVEAMNWLKSAAKLLAAEVKDKKTGEILRKRCAVHWVTPDGFPVWQEYKKPIQTRLNLMFLGQFRLQPTINTNKDSEIDAHKQESGIAPNFVHSQDGSHLRKTVVWAHEKYGIESFALIHDSFGTIPADAANLFKAVRETMVDTYESCDVLADFYDQFADQLHESQLDKMPALPAKGNLNLRDILESDFAFA

SEQ ID NO: 61 - protein, 883 aa, synthetic construct
MNTINIAKNDFSDIELAAIPFNTLADHYGERLAREQLALEHESYEMGEARFRKMFERQLKAGEVADNAAAKPLITTLLPKMIARINDWFEEVKAKRGKRPTAFQFLQEIKPEAVAYITIKTTLACLTSAENTTVQAVASAIGRAIEDEARFGRIRDLEAKHFKKNVEEQLNARVGHVHKKAFMQVVEADMLSKGLLGGEAWSSWHKEDSIHVGVRCIEMLIESTGMVSLHRQNAGVVGQDSETIELAPEYAEAIATRAGALAGISPMFQPCVVPPKPWTGITGGGYWANGRRPLALVRTHSKKALMRYEDVYMPEVYKAINIAQNTAWKINKKVLAVANVITKWKHCPVEDIPAIEREELPMKPEDIDMNPEALTAWKRAAAAVYRKDKARKSRRISLEFMLEQANKFANHKAIWFPYNMDWRGRVYAVSMFNPQGNDMTKGLLTLAKGKPIGKEGYYWLKIHGANCAGVDKVPFPERIKFIEENHENIMACAKSPLENTWWAEQDSPFCFLAFCFEYAGVQHHGLSYNCSLPLAFDGSCSGIQHFSAMLRDEVGGRAVNLLPSETVQDIYGIVAKKVNEILQADAINGTDNEVVTVTDENTGEISEKVKLGTKALAGQWLAYGVTRSVTKRSVMTLAYGSKEFGFRQQVLEDTIQPAIDSGKGLMFTQPNQAAGYMAKLIWESVSVTVVAAVEAMNWLKSAAKLLAAEVKDKKTGEILRKRCAVHWVTPDGFPVWQEYKKPIQTRLNLMFLGQFRLQPTINTNKDSEIDAHKQESGIAPNFVHSQDGSHLRKTVVWAHEKYGIESFALIHDSFGTIPADAANLFKAVRETMVDTYESCDVLADFYDQFADQLHESQLDKMPALPAKGNLNLRDILESDFAFA

SEQ ID NO: 62 - protein, 883 aa, synthetic construct
MNTINIAKNDFSDIELAAIPFNTLADHYGERLAREQLALEHESYEMGEARFRKMFERQLKAGEVADNAAAKPLITTLLPKMIARINDWFEEVKAKRGKRPTAFQFLQEIKPEAVAYITIKTTLACLTSAENTTVQAVASAIGRAIEDEARFGRIRDLEAKHFKKNVEEQLNAAVGHVYKKAFMQVVEADMLSKGLLGGEAWSSWHKEDSIHVGVRCIEMLIESTGMVSLHRQNAGVVGQDSETIELAPEYAEAIATRAGALAGISPMFQPCVVPPKPWTGITGGGYWANGRRPLALVRTHSKKALMRYEDVYMPEVYKAINIAQNTAWKINKKVLAVANVITKWKHCPVEDIPAIEREELPMKPEDIDMNPEALTAWKRAAAAVYRKDKARKSRRISLEFMLEQANKFANHKAIWFPYNMDWRGRVYAVSMFNPQGNDMTKGLLTLAKGKPIGKEGYYWLKIHGANCAGVDKVPFPERIKFIEENHENIMACAKSPLENTWWAEQDSPFCFLAFCFEYAGVQHHGLSYNCSLPLAFDGSCSGIQHFSAMLRDEVGGRAVNLLPSETVQDIYGIVAKKVNEILQADAINGTDNEVVTVTDENTGEISEKVKLGTKALAGQWLAYGVTRSVTKRSVMTLAYGSKEFGFRQQVLEDTIQPAIDSGKGLMFTQPNQAAGYMAKLIWESVSVTVVAAVEAMNWLKSAAKLLAAEVKDKKTGEILRKRCAVHWVTPDGFPVWQEYKKPIQTRLNLMFLGQFRLQPTINTNKDSEIDAHKQESGIAPNFVHSQDGSHLRKTVVWAHEKYGIESFALIHDSFGTIPADAANLFKAVRETMVDTYESCDVLADFYDQFADQLHESQLDKMPALPAKGNLNLRDILESDFAFA

SEQ ID NO: 63 - protein, 883 aa, synthetic construct
MNTINIAKNDFSDIELAAIPFNTLADHYGERLAREQLALEHESYEMGEARFRKMFERQLKAGEVADNAAAKPLITTLLPKMIARINDWFEEVKAKRGKRPTAFQFLQEIKPEAVAYITIKTTLACLTSAENTTVQAVASAIGRAIEDEARFGRIRDLEAKHFKKNVEEQLNGGVGHVYKKAFMQVVEADMLSKGLLGGEAWSSWHKEDSIHVGVRCIEMLIESTGMVSLHRQNAGVVGQDSETIELAPEYAEAIATRAGALAGISPMFQPCVVPPKPWTGITGGGYWANGRRPLALVRTHSKKALMRYEDVYMPEVYKAINIAQNTAWKINKKVLAVANVITKWKHCPVEDIPAIEREELPMKPEDIDMNPEALTAWKRAAAAVYRKGKARKSRRISLEFMLEQANKFANHKAIWFPYNMDWRGRVYAVSMFNPQGNDMTKGLLTLAKGKPIGKEGYYWLKIHGANCAGVDKVPFPERIKFIEENHENIMACAKSPLENTWWAEQDSPFCFLAFCFEYAGVQHHGLSYNCSLPLAFDGSCSGIQHFSAMLRDEVGGRAVNLLPSETVQDIYGIVAKKVNEILQADAINGTDNEVVTVTDENTGEISEKVKLGTKALAGQWLAYGVTRSVTKRSVMTLAYGSKEFGFRQQVLEDTIQPAIDSGKGLMFTQPNQAAGYMAKLIWESVSVTVVAAVEAMNWLKSAAKLLAAEVKDKKTGEILRKRCAVHWVTPDGFPVWQEYKKPIQTRLNLMFLGQFRLQPTINTNKDSEIDAHKQESGIAPNFVHSQDGSHLRKTVVWAHEKYGIESFALIHDSFGTIPADAANLFKAVRETMVDTYESCDVLADFYDQFADQLHESQLDKMPALPAKGNLNLRDILESDFAFA

SEQ ID NO: 64 - protein, 883 aa, synthetic construct
MNTINIAKNDFSDIELAAIPFNTLADHYGERLAREQLALEHESYEMGEARFRKMFERQLKAGEVADNAAAKPLITTLLPKMIARINDWFEEVKAKRGKRPTAFQFLQEIKPEAVAYITIKTTLACLTSAENTTVQAVASAIGRAIEDEARFGRIRDLEAKHFKKNVEEQLNGCVGHVHKKAFMQVVEADMLSKGLLGGEAWSSWHKEDSIHVGVRCIEMLIESTGMVSLHRQNAGVVGQDSETIELAPEYAEAIATRAGALAGISPMFQPCVVPPKPWTGITGGGYWANGRRPLALVRTHSKKALMRYEDVYMPEVYKAINIAQNTAWKINKKVLAVANVITKWKHCPVEDIPAIEREELPMKPEDIDMNPEALTAWKRAAAAVYRKYKARKSRRISLEFMLEQANKFANHKAIWFPYNMDWRGRVYAVSMFNPQGNDMTKGLLTLAKGKPIGKEGYYWLKIHGANCAGVDKVPFPERIKFIEENHENIMACAKSPLENTWWAEQDSPFCFLAFCFEYAGVQHHGLSYNCSLPLAFDGSCSGIQHFSAMLRDEVGGRAVNLLPSETVQDIYGIVAKKVNEILQADAINGTDNEVVTVTDENTGEISEKVKLGTKALAGQWLAYGVTRSVTKRSVMTLAYGSKEFGFRQQVLEDTIQPAIDSGKGLMFTQPNQAAGYMAKLIWESVSVTVVAAVEAMNWLKSAAKLLAAEVKDKKTGEILRKRCAVHWVTPDGFPVWQEYKKPIQTRLNLMFLGQFRLQPTINTNKDSEIDAHKQESGIAPNFVHSQDGSHLRKTVVWAHEKYGIESFALIHDSFGTIPADAANLFKAVRETMVDTYESCDVLADFYDQFADQLHESQLDKMPALPAKGNLNLRDILESDFAFA

SEQ ID NO: 65 - protein, 883 aa, synthetic construct
MNTINIAKNDFSDIELAAIPFNTLADHYGERLAREQLALEHESYEMGEARFRKMFERQLKAGEVADNAAAKPLITTLLPKMIARINDWFEEVKAKRGKRPTAFQFLQEIKPEAVAYITIKTTLACLTSADNTTVQAVASAIGRAIEDEARFGRIRDLEAKHFKKNVEEQLNGRVGHVYKKAFMQVVEADMLSKGLLGGEAWSSWHKEDSIHVGVRCIEMLIESTGMVSLHRQNAGVVGQDSETIELAPEYAEAIATRAGALAGISPMFQPCVVPPKPWTGITGGGYWANGRRPLALVRTHSKKALMRYEDVYMPEVYKAINIAQNTAWKINKKVLAVANVITKWKHCPVEDIPAIEREELPMKPEDIDMNPEALTAWKRAAAAVYRKYKARKSRRISLEFMLEQANKFANHKAIWFPYNMDWRGRVYAVSMFNPQGNDMTKGLLTLAKGKPIGKEGYYWLKIHGANCAGVDKVPFPERIKFIEENHENIMACAKSPLENTWWAEQDSPFCFLAFCFEYAGVQHHGLSYNCSLPLAFDGSCSGIQHFSAMLRDEVGGRAVNLLPSETVQDIYGIVAKKVNEILQADAINGTDNEVVTVTDENTGEISEKVKLGTKALAGQWLAYGVTRSVTKRSVMTLAYGSKEFGFRQQVLEDTIQPAIDSGKGLMFTQPNQAAGYMAKLIWESVSVTVVAAVEAMNWLKSAAKLLAAEVKDKKTGEILRKRCAVHWVTPDGFPVWQEYKKPIQTRLNLMFLGQFRLQPTINTNKDSEIDAHKQESGIAPNFVHSQDGSHLRKTVVWAHEKYGIESFALIHDSFGTIPADAANLFKAVRETMVDTYESCDVLADFYDQFADQLHESQLDKMPALPAKGNLNLRDILESDFAFA

SEQ ID NO: 66 - protein, 883 aa, synthetic construct
MNTINIAKNDFSDIELAAIPFNTLADHYGERLAREQLALEHESYEMGEARFRKMFERQLKAGEVADNAAAKPLITTLLPKMIARINDWFEEVKAKRGKRPTAFQFLQEIKPEAVAYITIKTTLACLTSAENTTVQAVASAIGRAIEDEARFGRIRDLEAKHFKKNVEEQLNARVGHVYKKAFMQVVEADMLSKGLLGGEAWSSWHKEDSIHVGVRCIEMLIESTGMVSLHRQNAGVVGQDSETIELAPEYAEAIATRAGALAGISPMFQPCVVPPKPWTGITGGGYWANGRRPLALVRTHSKKALMRYEDVYMPEVYKAINIAQNTAWKINKKVLAVANVITKWKHCPVEDIPAIEREELPMKPEDIDMNPEALTAWKRAAAAVYRKDKARKSRRISLEFMLEQANKFANHKAIWFPYNMDWRGRVYAVSMFNPQGNDMTKGLLTLAKGKPIGKEGYYWLKIHGANCAGVDKVPFPERIKFIEENHENIMACAKSPLENTWWAEQDSPFCFLAFCFEYAGVQHHGLSYNCSLPLAFDGSCSGIQHFSAMLRDEVGGRAVNLLPSETVQDIYGIVAKKVNEILQADAINGTDNEVVTVTDENTGEISEKVKLGTKALAGQWLAYGVTRSVTKRSVMTLAYGSKEFGFRQQVLEDTIQPAIDSGKGLMFTQPNQAAGYMAKLIWESVSVTVVAAVEAMNWLKSAAKLLAAEVKDKKTGEILRKRCAVHWVTPDGFPVWQEYKKPIQTRLNLMFLGQFRLQPTINTNKDSEIDAHKQESGIAPNFVHSQDGSHLRKTVVWAHEKYGIESFALIHDSFGTIPADAANLFKAVRETMVDTYESCDVLADFYDQFADQLHESQLDKMPALPAKGNLNLRDILESDFAFA

SEQ ID NO: 67 - protein, 883 aa, synthetic construct
MNTINIAKNDFSDIELAAIPFNTLADHYGERLAREQLALEHESYEMGEARFRKMFERQLKAGEVADNAAAKPLITTLLPKMIARINDWFEEVKAKRGKRPTAFQFLQEIKPEAVAYITIKTTLACLTSAENTTVQAVASAIGRAIEDEARFGRIRDLEAKHFKKNVEEQLNKAVGHVYKKAFMQVVEADMLSKGLLGGEAWSSWHKEDSIHVGVRCIEMLIESTGMVSLHRQNAGVVGQDSETIELAPEYAEAIATRAGALAGISPMFQPCVVPPKPWTGITGGGYWANGRRPLALVRTHSKKALMRYEDVYMPEVYKAINIAQNTAWKINKKVLAVANVITKWKHCPVEDIPAIEREELPMKPEDIDMNPEALTAWKRAAAAVYRKGKARKSRRISLEFMLEQANKFANHKAIWFPYNMDWRGRVYAVSMFNPQGNDMTKGLLTLAKGKPIGKEGYYWLKIHGANCAGVDKVPFPERIKFIEENHENIMACAKSPLENTWWAEQDSPFCFLAFCFEYAGVQHHGLSYNCSLPLAFDGSCSGIQHFSAMLRDEVGGRAVNLLPSETVQDIYGIVAKKVNEILQADAINGTDNEVVTVTDENTGEISEKVKLGTKALAGQWLAYGVTRSVTKRSVMTLAYGSKEFGFRQQVLEDTIQPAIDSGKGLMFTQPNQAAGYMAKLIWESVSVTVVAAVEAMNWLKSAAKLLAAEVKDKKTGEILRKRCAVHWVTPDGFPVWQEYKKPIQTRLNLMFLGQFRLQPTINTNKDSEIDAHKQESGIAPNFVHSQDGSHLRKTVVWAHEKYGIESFALIHDSFGTIPADAANLFKAVRETMVDTYESCDVLADFYDQFADQLHESQLDKMPALPAKGNLNLRDILESDFAFA

SEQ ID NO: 68 - protein, 883 aa, synthetic construct
MNTINIAKNDFSDIELAAIPFNTLADHYGERLAREQLALEHESYEMGEARFRKMFERQLKAGEVADNAAAKPLITTLLPKMIARINDWFEEVKAKRGKRPTAFQFLQEIKPEAVAYITIKTTLACLTSADNTTVQAVASAIGRAIEDEARFGRIRDLEAKHFKKNVEEQLNARVGHVYKKAFMQVVEADMLSKGLLGGEAWSSWHKEDSIHVGVRCIEMLIESTGMVSLHRQNAGVVGQDSETIELAPEYAEAIATRAGALAGISPMFQPCVVPPKPWTGITGGGYWANGRRPLALVRTHSKKALMRYEDVYMPEVYKAINIAQNTAWKINKKVLAVANVITKWKHCPVEDIPAIEREELPMKPEDIDMNPEALTAWKRAAAAVYRKYKARKSRRISLEFMLEQANKFANHKAIWFPYNMDWRGRVYAVSMFNPQGNDMTKGLLTLAKGKPIGKEGYYWLKIHGANCAGVDKVPFPERIKFIEENHENIMACAKSPLENTWWAEQDSPFCFLAFCFEYAGVQHHGLSYNCSLPLAFDGSCSGIQHFSAMLRDEVGGRAVNLLPSETVQDIYGIVAKKVNEILQADAINGTDNEVVTVTDENTGEISEKVKLGTKALAGQWLAYGVTRSVTKRSVMTLAYGSKEFGFRQQVLEDTIQPAIDSGKGLMFTQPNQAAGYMAKLIWESVSVTVVAAVEAMNWLKSAAKLLAAEVKDKKTGEILRKRCAVHWVTPDGFPVWQEYKKPIQTRLNLMFLGQFRLQPTINTNKDSEIDAHKQESGIAPNFVHSQDGSHLRKTVVWAHEKYGIESFALIHDSFGTIPADAANLFKAVRETMVDTYESCDVLADFYDQFADQLHESQLDKMPALPAKGNLNLRDILESDFAFA

SEQ ID NO: 69 - protein, 883 aa, synthetic construct
MNTINIAKNDFSDIELAAIPFNTLADHYGERLAREQLALEHESYEMGEARFRKMFERQLKAGEVADNAAAKPLITTLLPKMIARINDWFEEVKAKRGKRPTAFQFLQEIKPEAVAYITIKTTLACLTSAENTTVQAVASAIGRAIEDEARFGRIRDLEAKHFKKNVEEQLNACVGHVYKKAFMQVVEADMLSKGLLGGEAWSSWHKEDSIHVGVRCIEMLIESTGMVSLHRQNAGVVGQDSETIELAPEYAEAIATRAGALAGISPMFQPCVVPPKPWTGITGGGYWANGRRPLALVRTHSKKALMRYEDVYMPEVYKAINIAQNTAWKINKKVLAVANVITKWKHCPVEDIPAIEREELPMKPEDIDMNPEALTAWKRAAAAVYRKGKARKSRRISLEFMLEQANKFANHKAIWFPYNMDWRGRVYAVSMFNPQGNDMTKGLLTLAKGKPIGKEGYYWLKIHGANCAGVDKVPFPERIKFIEENHENIMACAKSPLENTWWAEQDSPFCFLAFCFEYAGVQHHGLSYNCSLPLAFDGSCSGIQHFSAMLRDEVGGRAVNLLPSETVQDIYGIVAKKVNEILQADAINGTDNEVVTVTDENTGEISEKVKLGTKALAGQWLAYGVTRSVTKRSVMTLAYGSKEFGFRQQVLEDTIQPAIDSGKGLMFTQPNQAAGYMAKLIWESVSVTVVAAVEAMNWLKSAAKLLAAEVKDKKTGEILRKRCAVHWVTPDGFPVWQEYKKPIQTRLNLMFLGQFRLQPTINTNKDSEIDAHKQESGIAPNFVHSQDGSHLRKTVVWAHEKYGIESFALIHDSFGTIPADAANLFKAVRETMVDTYESCDVLADFYDQFADQLHESQLDKMPALPAKGNLNLRDILESDFAFA

SEQ ID NO: 70 - protein, 883 aa, synthetic construct
MNTINIAKNDFSDIELAAIPFNTLADHYGERLAREQLALEHESYEMGEARFRKMFERQLKAGEVADNAAAKPLITTLLPKMIARINDWFEEVKAKRGKRPTAFQFLQEIKPEAVAYITIKTTLACLTSAENTTVQAVASAIGRAIEDEARFGRIRDLEAKHFKKNVEEQLNKCVGHVYKKAFMQVVEADMLSKGLLGGEAWSSWHKEDSIHVGVRCIEMLIESTGMVSLHRQNAGVVGQDSETIELAPEYAEAIATRAGALAGISPMFQPCVVPPKPWTGITGGGYWANGRRPLALVRTHSKKALMRYEDVYMPEVYKAINIAQNTAWKINKKVLAVANVITKWKHCPVEDIPAIEREELPMKPEDIDMNPEALTAWKRAAAAVYRKDKARKSRRISLEFMLEQANKFANHKAIWFPYNMDWRGRVYAVSMFNPQGNDMTKGLLTLAKGKPIGKEGYYWLKIHGANCAGVDKVPFPERIKFIEENHENIMACAKSPLENTWWAEQDSPFCFLAFCFEYAGVQHHGLSYNCSLPLAFDGSCSGIQHFSAMLRDEVGGRAVNLLPSETVQDIYGIVAKKVNEILQADAINGTDNEVVTVTDENTGEISEKVKLGTKALAGQWLAYGVTRSVTKRSVMTLAYGSKEFGFRQQVLEDTIQPAIDSGKGLMFTQPNQAAGYMAKLIWESVSVTVVAAVEAMNWLKSAAKLLAAEVKDKKTGEILRKRCAVHWVTPDGFPVWQEYKKPIQTRLNLMFLGQFRLQPTINTNKDSEIDAHKQESGIAPNFVHSQDGSHLRKTVVWAHEKYGIESFALIHDSFGTIPADAANLFKAVRETMVDTYESCDVLADFYDQFADQLHESQLDKMPALPAKGNLNLRDILESDFAFA

SEQ ID NO: 71 - protein, 883 aa, synthetic construct
MNTINIAKNDFSDIELAAIPFNTLADHYGERLAREQLALEHESYEMGEARFRKMFERQLKAGEVADNAAAKPLITTLLPKMIARINDWFEEVKAKRGKRPTAFQFLQEIKPEAVAYITIKTTLACLTSADNTTVQAVASAIGRAIEDEARFGRIRDLEAKHFKKNVEEQLNKAVGHVYKKAFMQVVEADMLSKGLLGGEAWSSWHKEDSIHVGVRCIEMLIESTGMVSLHRQNAGVVGQDSETIELAPEYAEAIATRAGALAGISPMFQPCVVPPKPWTGITGGGYWANGRRPLALVRTHSKKALMRYEDVYMPEVYKAINIAQNTAWKINKKVLAVANVITKWKHCPVEDIPAIEREELPMKPEDIDMNPEALTAWKRAAAAVYRKYKARKSRRISLEFMLEQANKFANHKAIWFPYNMDWRGRVYAVSMFNPQGNDMTKGLLTLAKGKPIGKEGYYWLKIHGANCAGVDKVPFPERIKFIEENHENIMACAKSPLENTWWAEQDSPFCFLAFCFEYAGVQHHGLSYNCSLPLAFDGSCSGIQHFSAMLRDEVGGRAVNLLPSETVQDIYGIVAKKVNEILQADAINGTDNEVVTVTDENTGEISEKVKLGTKALAGQWLAYGVTRSVTKRSVMTLAYGSKEFGFRQQVLEDTIQPAIDSGKGLMFTQPNQAAGYMAKLIWESVSVTVVAAVEAMNWLKSAAKLLAAEVKDKKTGEILRKRCAVHWVTPDGFPVWQEYKKPIQTRLNLMFLGQFRLQPTINTNKDSEIDAHKQESGIAPNFVHSQDGSHLRKTVVWAHEKYGIESFALIHDSFGTIPADAANLFKAVRETMVDTYESCDVLADFYDQFADQLHESQLDKMPALPAKGNLNLRDILESDFAFA

SEQ ID NO: 72 - protein, 883 aa, synthetic construct
MNTINIAKNDFSDIELAAIPFNTLADHYGERLAREQLALEHESYEMGEARFRKMFERQLKAGEVADNAAAKPLITTLLPKMIARINDWFEEVKAKRGKRPTAFQFLQEIKPEAVAYITIKTTLACLTSAENTTVQAVASAIGRAIEDEARFGRIRDLEAKHFKKNVEEQLNKAVGHVYKKAFMQVVEADMLSKGLLGGEAWSSWHKEDSIHVGVRCIEMLIESTGMVSLHRQNAGVVGQDSETIELAPEYAEAIATRAGALAGISPMFQPCVVPPKPWTGITGGGYWANGRRPLALVRTHSKKALMRYEDVYMPEVYKAINIAQNTAWKINKKVLAVANVITKWKHCPVEDIPAIEREELPMKPEDIDMNPEALTAWKRAAAAVYRKDKARKSRRISLEFMLEQANKFANHKAIWFPYNMDWRGRVYAVSMFNPQGNDMTKGLLTLAKGKPIGKEGYYWLKIHGANCAGVDKVPFPERIKFIEENHENIMACAKSPLENTWWAEQDSPFCFLAFCFEYAGVQHHGLSYNCSLPLAFDGSCSGIQHFSAMLRDEVGGRAVNLLPSETVQDIYGIVAKKVNEILQADAINGTDNEVVTVTDENTGEISEKVKLGTKALAGQWLAYGVTRSVTKRSVMTLAYGSKEFGFRQQVLEDTIQPAIDSGKGLMFTQPNQAAGYMAKLIWESVSVTVVAAVEAMNWLKSAAKLLAAEVKDKKTGEILRKRCAVHWVTPDGFPVWQEYKKPIQTRLNLMFLGQFRLQPTINTNKDSEIDAHKQESGIAPNFVHSQDGSHLRKTVVWAHEKYGIESFALIHDSFGTIPADAANLFKAVRETMVDTYESCDVLADFYDQFADQLHESQLDKMPALPAKGNLNLRDILESDFAFA

SEQ ID NO: 73 - protein, 883 aa, synthetic construct
MNTINIAKNDFSDIELAAIPFNTLADHYGERLAREQLALEHESYEMGEARFRKMFERQLKAGEVADNAAAKPLITTLLPKMIARINDWFEEVKAKRGKRPTAFQFLQEIKPEAVAYITIKTTLACLTSAENTTVQAVASAIGRAIEDEARFGRIRDLEAKHFKKNVEEQLNARVGHVHKKAFMQVVEADMLSKGLLGGEAWSSWHKEDSIHVGVRCIEMLIESTGMVSLHRQNAGVVGQDSETIELAPEYAEAIATRAGALAGISPMFQPCVVPPKPWTGITGGGYWANGRRPLALVRTHSKKALMRYEDVYMPEVYKAINIAQNTAWKINKKVLAVANVITKWKHCPVEDIPAIEREELPMKPEDIDMNPEALTAWKRAAAAVYRKYKARKSRRISLEFMLEQANKFANHKAIWFPYNMDWRGRVYAVSMFNPQGNDMTKGLLTLAKGKPIGKEGYYWLKIHGANCAGVDKVPFPERIKFIEENHENIMACAKSPLENTWWAEQDSPFCFLAFCFEYAGVQHHGLSYNCSLPLAFDGSCSGIQHFSAMLRDEVGGRAVNLLPSETVQDIYGIVAKKVNEILQADAINGTDNEVVTVTDENTGEISEKVKLGTKALAGQWLAYGVTRSVTKRSVMTLAYGSKEFGFRQQVLEDTIQPAIDSGKGLMFTQPNQAAGYMAKLIWESVSVTVVAAVEAMNWLKSAAKLLAAEVKDKKTGEILRKRCAVHWVTPDGFPVWQEYKKPIQTRLNLMFLGQFRLQPTINTNKDSEIDAHKQESGIAPNFVHSQDGSHLRKTVVWAHEKYGIESFALIHDSFGTIPADAANLFKAVRETMVDTYESCDVLADFYDQFADQLHESQLDKMPALPAKGNLNLRDILESDFAFA

SEQ ID NO: 74 - protein, 883 aa, synthetic construct
MNTINIAKNDFSDIELAAIPFNTLADHYGERLAREQLALEHESYEMGEARFRKMFERQLKAGEVADNAAAKPLITTLLPKMIARINDWFEEVKAKRGKRPTAFQFLQEIKPEAVAYITIKTTLACLTSAENTTVQAVASAIGRAIEDEARFGRIRDLEAKHFKKNVEEQLNAGVGHVHKKAFMQVVEADMLSKGLLGGEAWSSWHKEDSIHVGVRCIEMLIESTGMVSLHRQNAGVVGQDSETIELAPEYAEAIATRAGALAGISPMFQPCVVPPKPWTGITGGGYWANGRRPLALVRTHSKKALMRYEDVYMPEVYKAINIAQNTAWKINKKVLAVANVITKWKHCPVEDIPAIEREELPMKPEDIDMNPEALTAWKRAAAAVYRKDKARKSRRISLEFMLEQANKFANHKAIWFPYNMDWRGRVYAVSMFNPQGNDMTKGLLTLAKGKPIGKEGYYWLKIHGANCAGVDKVPFPERIKFIEENHENIMACAKSPLENTWWAEQDSPFCFLAFCFEYAGVQHHGLSYNCSLPLAFDGSCSGIQHFSAMLRDEVGGRAVNLLPSETVQDIYGIVAKKVNEILQADAINGTDNEVVTVTDENTGEISEKVKLGTKALAGQWLAYGVTRSVTKRSVMTLAYGSKEFGFRQQVLEDTIQPAIDSGKGLMFTQPNQAAGYMAKLIWESVSVTVVAAVEAMNWLKSAAKLLAAEVKDKKTGEILRKRCAVHWVTPDGFPVWQEYKKPIQTRLNLMFLGQFRLQPTINTNKDSEIDAHKQESGIAPNFVHSQDGSHLRKTVVWAHEKYGIESFALIHDSFGTIPADAANLFKAVRETMVDTYESCDVLADFYDQFADQLHESQLDKMPALPAKGNLNLRDILESDFAFA

SEQ ID NO: 75 - protein, 883 aa, synthetic construct
MNTINIAKNDFSDIELAAIPFNTLADHYGERLAREQLALEHESYEMGEARFRKMFERQLKAGEVADNAAAKPLITTLLPKMIARINDWFEEVKAKRGKRPTAFQFLQEIKPEAVAYITIKTTLACLTSADNTTVQAVASAIGRAIEDEARFGRIRDLEAKHFKKNVEEQLNARVGHVHKKAFMQVVEADMLSKGLLGGEAWSSWHKEDSIHVGVRCIEMLIESTGMVSLHRQNAGVVGQDSETIELAPEYAEAIATRAGALAGISPMFQPCVVPPKPWTGITGGGYWANGRRPLALVRTHSKKALMRYEDVYMPEVYKAINIAQNTAWKINKKVLAVANVITKWKHCPVEDIPAIEREELPMKPEDIDMNPEALTAWKRAAAAVYRKYKARKSRRISLEFMLEQANKFANHKAIWFPYNMDWRGRVYAVSMFNPQGNDMTKGLLTLAKGKPIGKEGYYWLKIHGANCAGVDKVPFPERIKFIEENHENIMACAKSPLENTWWAEQDSPFCFLAFCFEYAGVQHHGLSYNCSLPLAFDGSCSGIQHFSAMLRDEVGGRAVNLLPSETVQDIYGIVAKKVNEILQADAINGTDNEVVTVTDENTGEISEKVKLGTKALAGQWLAYGVTRSVTKRSVMTLAYGSKEFGFRQQVLEDTIQPAIDSGKGLMFTQPNQAAGYMAKLIWESVSVTVVAAVEAMNWLKSAAKLLAAEVKDKKTGEILRKRCAVHWVTPDGFPVWQEYKKPIQTRLNLMFLGQFRLQPTINTNKDSEIDAHKQESGIAPNFVHSQDGSHLRKTVVWAHEKYGIESFALIHDSFGTIPADAANLFKAVRETMVDTYESCDVLADFYDQFADQLHESQLDKMPALPAKGNLNLRDILESDFAFA

SEQ ID NO: 76 - protein, 883 aa, synthetic construct
MNTINIAKNDFSDIELAAIPFNTLADHYGERLAREQLALEHESYEMGEARFRKMFERQLKAGEVADNAAAKPLITTLLPKMIARINDWFEEVKAKRGKRPTAFQFLQEIKPEAVAYITIKTTLACLTSAENTTVQAVASAIGRAIEDEARFGRIRDLEAKHFKKNVEEQLNGRVGHVYKKAFMQVVEADMLSKGLLGGEAWSSWHKEDSIHVGVRCIEMLIESTGMVSLHRQNAGVVGQDSETIELAPEYAEAIATRAGALAGISPMFQPCVVPPKPWTGITGGGYWANGRRPLALVRTHSKKALMRYEDVYMPEVYKAINIAQNTAWKINKKVLAVANVITKWKHCPVEDIPAIEREELPMKPEDIDMNPEALTAWKRAAAAVYRKYKARKSRRISLEFMLEQANKFANHKAIWFPYNMDWRGRVYAVSMFNPQGNDMTKGLLTLAKGKPIGKEGYYWLKIHGANCAGVDKVPFPERIKFIEENHENIMACAKSPLENTWWAEQDSPFCFLAFCFEYAGVQHHGLSYNCSLPLAFDGSCSGIQHFSAMLRDEVGGRAVNLLPSETVQDIYGIVAKKVNEILQADAINGTDNEVVTVTDENTGEISEKVKLGTKALAGQWLAYGVTRSVTKRSVMTLAYGSKEFGFRQQVLEDTIQPAIDSGKGLMFTQPNQAAGYMAKLIWESVSVTVVAAVEAMNWLKSAAKLLAAEVKDKKTGEILRKRCAVHWVTPDGFPVWQEYKKPIQTRLNLMFLGQFRLQPTINTNKDSEIDAHKQESGIAPNFVHSQDGSHLRKTVVWAHEKYGIESFALIHDSFGTIPADAANLFKAVRETMVDTYESCDVLADFYDQFADQLHESQLDKMPALPAKGNLNLRDILESDFAFA

SEQ ID NO: 77 - protein, 883 aa, synthetic construct
MNTINIAKNDFSDIELAAIPFNTLADHYGERLAREQLALEHESYEMGEARFRKMFERQLKAGEVADNAAAKPLITTLLPKMIARINDWFEEVKAKRGKRPTAFQFLQEIKPEAVAYITIKTTLACLTSAENTTVQAVASAIGRAIEDEARFGRIRDLEAKHFKKNVEEQLNACVGHVHKKAFMQVVEADMLSKGLLGGEAWSSWHKEDSIHVGVRCIEMLIESTGMVSLHRQNAGVVGQDSETIELAPEYAEAIATRAGALAGISPMFQPCVVPPKPWTGITGGGYWANGRRPLALVRTHSKKALMRYEDVYMPEVYKAINIAQNTAWKINKKVLAVANVITKWKHCPVEDIPAIEREELPMKPEDIDMNPEALTAWKRAAAAVYRKYKARKSRRISLEFMLEQANKFANHKAIWFPYNMDWRGRVYAVSMFNPQGNDMTKGLLTLAKGKPIGKEGYYWLKIHGANCAGVDKVPFPERIKFIEENHENIMACAKSPLENTWWAEQDSPFCFLAFCFEYAGVQHHGLSYNCSLPLAFDGSCSGIQHFSAMLRDEVGGRAVNLLPSETVQDIYGIVAKKVNEILQADAINGTDNEVVTVTDENTGEISEKVKLGTKALAGQWLAYGVTRSVTKRSVMTLAYGSKEFGFRQQVLEDTIQPAIDSGKGLMFTQPNQAAGYMAKLIWESVSVTVVAAVEAMNWLKSAAKLLAAEVKDKKTGEILRKRCAVHWVTPDGFPVWQEYKKPIQTRLNLMFLGQFRLQPTINTNKDSEIDAHKQESGIAPNFVHSQDGSHLRKTVVWAHEKYGIESFALIHDSFGTIPADAANLFKAVRETMVDTYESCDVLADFYDQFADQLHESQLDKMPALPAKGNLNLRDILESDFAFA

SEQ ID NO: 78 - protein, 883 aa, synthetic construct
MNTINIAKNDFSDIELAAIPFNTLADHYGERLAREQLALEHESYEMGEARFRKMFERQLKAGEVADNAAAKPLITTLLPKMIARINDWFEEVKAKRGKRPTAFQFLQEIKPEAVAYITIKTTLACLTSAENTTVQAVASAIGRAIEDEARFGRIRDLEAKHFKKNVEEQLNGCVGHVHKKAFMQVVEADMLSKGLLGGEAWSSWHKEDSIHVGVRCIEMLIESTGMVSLHRQNAGVVGQDSETIELAPEYAEAIATRAGALAGISPMFQPCVVPPKPWTGITGGGYWANGRRPLALVRTHSKKALMRYEDVYMPEVYKAINIAQNTAWKINKKVLAVANVITKWKHCPVEDIPAIEREELPMKPEDIDMNPEALTAWKRAAAAVYRKGKARKSRRISLEFMLEQANKFANHKAIWFPYNMDWRGRVYAVSMFNPQGNDMTKGLLTLAKGKPIGKEGYYWLKIHGANCAGVDKVPFPERIKFIEENHENIMACAKSPLENTWWAEQDSPFCFLAFCFEYAGVQHHGLSYNCSLPLAFDGSCSGIQHFSAMLRDEVGGRAVNLLPSETVQDIYGIVAKKVNEILQADAINGTDNEVVTVTDENTGEISEKVKLGTKALAGQWLAYGVTRSVTKRSVMTLAYGSKEFGFRQQVLEDTIQPAIDSGKGLMFTQPNQAAGYMAKLIWESVSVTVVAAVEAMNWLKSAAKLLAAEVKDKKTGEILRKRCAVHWVTPDGFPVWQEYKKPIQTRLNLMFLGQFRLQPTINTNKDSEIDAHKQESGIAPNFVHSQDGSHLRKTVVWAHEKYGIESFALIHDSFGTIPADAANLFKAVRETMVDTYESCDVLADFYDQFADQLHESQLDKMPALPAKGNLNLRDILESDFAFA

SEQ ID NO: 79 - protein, 883 aa, synthetic construct
MNTINIAKNDFSDIELAAIPFNTLADHYGERLAREQLALEHESYEMGEARFRKMFERQLKAGEVADNAAAKPLITTLLPKMIARINDWFEEVKAKRGKRPTAFQFLQEIKPEAVAYITIKTTLACLTSAENTTVQAVASAIGRAIEDEARFGRIRDLEAKHFKKNVEEQLNAGVGHVYKKAFMQVVEADMLSKGLLGGEAWSSWHKEDSIHVGVRCIEMLIESTGMVSLHRQNAGVVGQDSETIELAPEYAEAIATRAGALAGISPMFQPCVVPPKPWTGITGGGYWANGRRPLALVRTHSKKALMRYEDVYMPEVYKAINIAQNTAWKINKKVLAVANVITKWKHCPVEDIPAIEREELPMKPEDIDMNPEALTAWKRAAAAVYRKYKARKSRRISLEFMLEQANKFANHKAIWFPYNMDWRGRVYAVSMFNPQGNDMTKGLLTLAKGKPIGKEGYYWLKIHGANCAGVDKVPFPERIKFIEENHENIMACAKSPLENTWWAEQDSPFCFLAFCFEYAGVQHHGLSYNCSLPLAFDGSCSGIQHFSAMLRDEVGGRAVNLLPSETVQDIYGIVAKKVNEILQADAINGTDNEVVTVTDENTGEISEKVKLGTKALAGQWLAYGVTRSVTKRSVMTLAYGSKEFGFRQQVLEDTIQPAIDSGKGLMFTQPNQAAGYMAKLIWESVSVTVVAAVEAMNWLKSAAKLLAAEVKDKKTGEILRKRCAVHWVTPDGFPVWQEYKKPIQTRLNLMFLGQFRLQPTINTNKDSEIDAHKQESGIAPNFVHSQDGSHLRKTVVWAHEKYGIESFALIHDSFGTIPADAANLFKAVRETMVDTYESCDVLADFYDQFADQLHESQLDKMPALPAKGNLNLRDILESDFAFA

SEQ ID NO: 80 - protein, 883 aa, synthetic construct
MNTINIAKNDFSDIELAAIPFNTLADHYGERLAREQLALEHESYEMGEARFRKMFERQLKAGEVADNAAAKPLITTLLPKMIARINDWFEEVKAKRGKRPTAFQFLQEIKPEAVAYITIKTTLACLTSADNTTVQAVASAIGRAIEDEARFGRIRDLEAKHFKKNVEEQLNACVGHVYKKAFMQVVEADMLSKGLLGGEAWSSWHKEDSIHVGVRCIEMLIESTGMVSLHRQNAGVVGQDSETIELAPEYAEAIATRAGALAGISPMFQPCVVPPKPWTGITGGGYWANGRRPLALVRTHSKKALMRYEDVYMPEVYKAINIAQNTAWKINKKVLAVANVITKWKHCPVEDIPAIEREELPMKPEDIDMNPEALTAWKRAAAAVYRKYKARKSRRISLEFMLEQANKFANHKAIWFPYNMDWRGRVYAVSMFNPQGNDMTKGLLTLAKGKPIGKEGYYWLKIHGANCAGVDKVPFPERIKFIEENHENIMACAKSPLENTWWAEQDSPFCFLAFCFEYAGVQHHGLSYNCSLPLAFDGSCSGIQHFSAMLRDEVGGRAVNLLPSETVQDIYGIVAKKVNEILQADAINGTDNEVVTVTDENTGEISEKVKLGTKALAGQWLAYGVTRSVTKRSVMTLAYGSKEFGFRQQVLEDTIQPAIDSGKGLMFTQPNQAAGYMAKLIWESVSVTVVAAVEAMNWLKSAAKLLAAEVKDKKTGEILRKRCAVHWVTPDGFPVWQEYKKPIQTRLNLMFLGQFRLQPTINTNKDSEIDAHKQESGIAPNFVHSQDGSHLRKTVVWAHEKYGIESFALIHDSFGTIPADAANLFKAVRETMVDTYESCDVLADFYDQFADQLHESQLDKMPALPAKGNLNLRDILESDFAFA

SEQ ID NO: 81 - protein, 883 aa, synthetic construct
MNTINIAKNDFSDIELAAIPFNTLADHYGERLAREQLALEHESYEMGEARFRKMFERQLKAGEVADNAAAKPLITTLLPKMIARINDWFEEVKAKRGKRPTAFQFLQEIKPEAVAYITIKTTLACLTSADNTTVQAVASAIGRAIEDEARFGRIRDLEAKHFKKNVEEQLNAAVGHVYKKAFMQVVEADMLSKGLLGGEAWSSWHKEDSIHVGVRCIEMLIESTGMVSLHRQNAGVVGQDSETIELAPEYAEAIATRAGALAGISPMFQPCVVPPKPWTGITGGGYWANGRRPLALVRTHSKKALMRYEDVYMPEVYKAINIAQNTAWKINKKVLAVANVITKWKHCPVEDIPAIEREELPMKPEDIDMNPEALTAWKRAAAAVYRKYKARKSRRISLEFMLEQANKFANHKAIWFPYNMDWRGRVYAVSMFNPQGNDMTKGLLTLAKGKPIGKEGYYWLKIHGANCAGVDKVPFPERIKFIEENHENIMACAKSPLENTWWAEQDSPFCFLAFCFEYAGVQHHGLSYNCSLPLAFDGSCSGIQHFSAMLRDEVGGRAVNLLPSETVQDIYGIVAKKVNEILQADAINGTDNEVVTVTDENTGEISEKVKLGTKALAGQWLAYGVTRSVTKRSVMTLAYGSKEFGFRQQVLEDTIQPAIDSGKGLMFTQPNQAAGYMAKLIWESVSVTVVAAVEAMNWLKSAAKLLAAEVKDKKTGEILRKRCAVHWVTPDGFPVWQEYKKPIQTRLNLMFLGQFRLQPTINTNKDSEIDAHKQESGIAPNFVHSQDGSHLRKTVVWAHEKYGIESFALIHDSFGTIPADAANLFKAVRETMVDTYESCDVLADFYDQFADQLHESQLDKMPALPAKGNLNLRDILESDFAFA

SEQ ID NO: 82 - protein, 882 aa, synthetic construct
MNTINIAKNDFSDIELAAIPFNTLADHYGERLAREQLALEHESYEMGEARFRKMFERQLKAGEVADNAAAKPLITTLLPKMIARINDWFEEVKAKRGKRPTAFQFLQEIKPEAVAYITIKTTLACLTSADNTTVQAVASAIGRAIEDEARFGRIRDLEAKHFKKNVEEQLNRVGHVYKKAFMQVVEADMLSKGLLGGEAWSSWHKEDSIHVGVRCIEMLIESTGMVSLHRQNAGVVGQDSETIELAPEYAEAIATRAGALAGISPMFQPCVVPPKPWTGITGGGYWANGRRPLALVRTHSKKALMRYEDVYMPEVYKAINIAQNTAWKINKKVLAVANVITKWKHCPVEDIPAIEREELPMKPEDIDMNPEALTAWKRAAAAVYRGDKARKSRRISLEFMLEQANKFANHKAIWFPYNMDWRGRVYAVSMFNPQGNDMTKGLLTLAKGKPIGKEGYYWLKIHGANCAGVDKVPFPERIKFIEENHENIMACAKSPLENTWWAEQDSPFCFLAFCFEYAGVQHHGLSYNCSLPLAFDGSCSGIQHFSAMLRDEVGGRAVNLLPSETVQDIYGIVAKKVNEILQADAINGTDNEVVTVTDENTGEISEKVKLGTKALAGQWLAYGVTRSVTKRSVMTLAYGSKEFGFRQQVLEDTIQPAIDSGKGLMFTQPNQAAGYMAKLIWESVSVTVVAAVEAMNWLKSAAKLLAAEVKDKKTGEILRKRCAVHWVTPDGFPVWQEYKKPIQTRLNLMFLGQFRLQPTINTNKDSEIDAHKQESGIAPNFVHSQDGSHLRKTVVWAHEKYGIESFALIHDSFGTIPADAANLFKAVRETMVDTYESCDVLADFYDQFADQLHESQLDKMPALPAKGNLNLRDILESDFAFA

SEQ ID NO: 83 - protein, 883 aa, synthetic construct
MNTINIAKNDFSDIELAAIPFNTLADHYGERLAREQLALEHESYEMGEARFRKMFERQLKAGEVADNAAAKPLITTLLPKMIARINDWFEEVKAKRGKRPTAFQFLQEIKPEAVAYITIKTTLACLTSAENTTVQAVASAIGRAIEDEARFGRIRDLEAKHFKKNVEEQLNKGVGHVPKKAFMQVVEADMLSKGLLGGEAWSSWHKEDSIHVGVRCIEMLIESTGMVSLHRQNAGVVGQDSETIELAPEYAEAIATRAGALAGISPMFQPCVVPPKPWTGITGGGYWANGRRPLALVRTHSKKALMRYEDVYMPEVYKAINIAQNTAWKINKKVLAVANVITKWKHCPVEDIPAIEREELPMKPEDIDMNPEALTAWKRAAAAVYRYDKARKSRRISLEFMLEQANKFANHKAIWFPYNMDWRGRVYAVSMFNPQGNDMTKGLLTLAKGKPIGKEGYYWLKIHGANCAGVDKVPFPERIKFIEENHENIMACAKSPLENTWWAEQDSPFCFLAFCFEYAGVQHHGLSYNCSLPLAFDGSCSGIQHFSAMLRDEVGGRAVNLLPSETVQDIYGIVAKKVNEILQADAINGTDNEVVTVTDENTGEISEKVKLGTKALAGQWLAYGVTRSVTKRSVMTLAYGSKEFGFRQQVLEDTIQPAIDSGKGLMFTQPNQAAGYMAKLIWESVSVTVVAAVEAMNWLKSAAKLLAAEVKDKKTGEILRKRCAVHWVTPDGFPVWQEYKKPIQTRLNLMFLGQFRLQPTINTNKDSEIDAHKQESGIAPNFVHSQDGSHLRKTVVWAHEKYGIESFALIHDSFGTIPADAANLFKAVRETMVDTYESCDVLADFYDQFADQLHESQLDKMPALPAKGNLNLRDILESDFAFA

SEQ ID NO: 84 - protein, 881 aa, synthetic construct
MNTINIAKNDFSDIELAAIPFNTLADHYGERLAREQLALEHESYEMGEARFRKMFERQLKAGEVADNAAAKPLITTLLPKMIARINDWFEEVKAKRGKRPTAFQFLQEIKPEAVAYITIKTTLACLTSADNTTVQAVASAIGRAIEDEARFGRIRDLEAKHFKKNVEEQLNVGHVYKKAFMQVVEADMLSKGLLGGEAWSSWHKEDSIHVGVRCIEMLIESTGMVSLHRQNAGVVGQDSETIELAPEYAEAIATRAGALAGISPMFQPCVVPPKPWTGITGGGYWANGRRPLALVRTHSKKALMRYEDVYMPEVYKAINIAQNTAWKINKKVLAVANVITKWKHCPVEDIPAIEREELPMKPEDIDMNPEALTAWKRAAAAVYRGDKARKSRRISLEFMLEQANKFANHKAIWFPYNMDWRGRVYAVSMFNPQGNDMTKGLLTLAKGKPIGKEGYYWLKIHGANCAGVDKVPFPERIKFIEENHENIMACAKSPLENTWWAEQDSPFCFLAFCFEYAGVQHHGLSYNCSLPLAFDGSCSGIQHFSAMLRDEVGGRAVNLLPSETVQDIYGIVAKKVNEILQADAINGTDNEVVTVTDENTGEISEKVKLGTKALAGQWLAYGVTRSVTKRSVMTLAYGSKEFGFRQQVLEDTIQPAIDSGKGLMFTQPNQAAGYMAKLIWESVSVTVVAAVEAMNWLKSAAKLLAAEVKDKKTGEILRKRCAVHWVTPDGFPVWQEYKKPIQTRLNLMFLGQFRLQPTINTNKDSEIDAHKQESGIAPNFVHSQDGSHLRKTVVWAHEKYGIESFALIHDSFGTIPADAANLFKAVRETMVDTYESCDVLADFYDQFADQLHESQLDKMPALPAKGNLNLRDILESDFAFA

SEQ ID NO: 85 - protein, 881 aa, synthetic construct
MNTINIAKNDFSDIELAAIPFNTLADHYGERLAREQLALEHESYEMGEARFRKMFERQLKAGEVADNAAAKPLITTLLPKMIARINDWFEEVKAKRGKRPTAFQFLQEIKPEAVAYITIKTTLACLTSADNTTVQAVASAIGRAIEDEARFGRIRDLEAKHFKKNVEEQLNVGHVYKKAFMQVVEADMLSKGLLGGEAWSSWHKEDSIHVGVRCIEMLIESTGMVSLHRQNAGVVGQDSETIELAPEYAEAIATRAGALAGISPMFQPCVVPPKPWTGITGGGYWANGRRPLALVRTHSKKALMRYEDVYMPEVYKAINIAQNTAWKINKKVLAVANVITKWKHCPVEDIPAIEREELPMKPEDIDMNPEALTAWKRAAAAVYRYDKARKSRRISLEFMLEQANKFANHKAIWFPYNMDWRGRVYAVSMFNPQGNDMTKGLLTLAKGKPIGKEGYYWLKIHGANCAGVDKVPFPERIKFIEENHENIMACAKSPLENTWWAEQDSPFCFLAFCFEYAGVQHHGLSYNCSLPLAFDGSCSGIQHFSAMLRDEVGGRAVNLLPSETVQDIYGIVAKKVNEILQADAINGTDNEVVTVTDENTGEISEKVKLGTKALAGQWLAYGVTRSVTKRSVMTLAYGSKEFGFRQQVLEDTIQPAIDSGKGLMFTQPNQAAGYMAKLIWESVSVTVVAAVEAMNWLKSAAKLLAAEVKDKKTGEILRKRCAVHWVTPDGFPVWQEYKKPIQTRLNLMFLGQFRLQPTINTNKDSEIDAHKQESGIAPNFVHSQDGSHLRKTVVWAHEKYGIESFALIHDSFGTIPADAANLFKAVRETMVDTYESCDVLADFYDQFADQLHESQLDKMPALPAKGNLNLRDILESDFAFA

SEQ ID NO: 86 - protein, 882 aa, synthetic construct
MNTINIAKNDFSDIELAAIPFNTLADHYGERLAREQLALEHESYEMGEARFRKMFERQLKAGEVADNAAAKPLITTLLPKMIARINDWFEEVKAKRGKRPTAFQFLQEIKPEAVAYITIKTTLACLTSADNTTVQAVASAIGRAIEDEARFGRIRDLEAKHFKKNVEEQLNAVGHVYKKAFMQVVEADMLSKGLLGGEAWSSWHKEDSIHVGVRCIEMLIESTGMVSLHRQNAGVVGQDSETIELAPEYAEAIATRAGALAGISPMFQPCVVPPKPWTGITGGGYWANGRRPLALVRTHSKKALMRYEDVYMPEVYKAINIAQNTAWKINKKVLAVANVITKWKHCPVEDIPAIEREELPMKPEDIDMNPEALTAWKRAAAAVYRSDKARKSRRISLEFMLEQANKFANHKAIWFPYNMDWRGRVYAVSMFNPQGNDMTKGLLTLAKGKPIGKEGYYWLKIHGANCAGVDKVPFPERIKFIEENHENIMACAKSPLENTWWAEQDSPFCFLAFCFEYAGVQHHGLSYNCSLPLAFDGSCSGIQHFSAMLRDEVGGRAVNLLPSETVQDIYGIVAKKVNEILQADAINGTDNEVVTVTDENTGEISEKVKLGTKALAGQWLAYGVTRSVTKRSVMTLAYGSKEFGFRQQVLEDTIQPAIDSGKGLMFTQPNQAAGYMAKLIWESVSVTVVAAVEAMNWLKSAAKLLAAEVKDKKTGEILRKRCAVHWVTPDGFPVWQEYKKPIQTRLNLMFLGQFRLQPTINTNKDSEIDAHKQESGIAPNFVHSQDGSHLRKTVVWAHEKYGIESFALIHDSFGTIPADAANLFKAVRETMVDTYESCDVLADFYDQFADQLHESQLDKMPALPAKGNLNLRDILESDFAFA

SEQ ID NO: 87 - protein, 882 aa, synthetic construct
MNTINIAKNDFSDIELAAIPFNTLADHYGERLAREQLALEHESYEMGEARFRKMFERQLKAGEVADNAAAKPLITTLLPKMIARINDWFEEVKAKRGKRPTAFQFLQEIKPEAVAYITIKTTLACLTSADNTTVQAVASAIGRAIEDEARFGRIRDLEAKHFKKNVEEQLNGVGHVYKKAFMQVVEADMLSKGLLGGEAWSSWHKEDSIHVGVRCIEMLIESTGMVSLHRQNAGVVGQDSETIELAPEYAEAIATRAGALAGISPMFQPCVVPPKPWTGITGGGYWANGRRPLALVRTHSKKALMRYEDVYMPEVYKAINIAQNTAWKINKKVLAVANVITKWKHCPVEDIPAIEREELPMKPEDIDMNPEALTAWKRAAAAVYRSDKARKSRRISLEFMLEQANKFANHKAIWFPYNMDWRGRVYAVSMFNPQGNDMTKGLLTLAKGKPIGKEGYYWLKIHGANCAGVDKVPFPERIKFIEENHENIMACAKSPLENTWWAEQDSPFCFLAFCFEYAGVQHHGLSYNCSLPLAFDGSCSGIQHFSAMLRDEVGGRAVNLLPSETVQDIYGIVAKKVNEILQADAINGTDNEVVTVTDENTGEISEKVKLGTKALAGQWLAYGVTRSVTKRSVMTLAYGSKEFGFRQQVLEDTIQPAIDSGKGLMFTQPNQAAGYMAKLIWESVSVTVVAAVEAMNWLKSAAKLLAAEVKDKKTGEILRKRCAVHWVTPDGFPVWQEYKKPIQTRLNLMFLGQFRLQPTINTNKDSEIDAHKQESGIAPNFVHSQDGSHLRKTVVWAHEKYGIESFALIHDSFGTIPADAANLFKAVRETMVDTYESCDVLADFYDQFADQLHESQLDKMPALPAKGNLNLRDILESDFAFA

SEQ ID NO: 88 - protein, 882 aa, synthetic construct; identical to SEQ ID NO: 41

SEQ ID NO: 89 - protein, 882 aa, synthetic construct; identical to SEQ ID NO: 43

SEQ ID NO: 90 - protein, 882 aa, synthetic construct
MNTINIAKNDFSDIELAAIPFNTLADHYGERLAREQLALEHESYEMGEARFRKMFERQLKAGEVADNAAAKPLITTLLPKMIARINDWFEEVKAKRGKRPTAFQFLQEIKPEAVAYITIKTTLACLTSADNTTVQAVASAIGRAIEDEARFGRIRDLEAKHFKKNVEEQLNRVGHVYKKAFMQVVEADMLSKGLLGGEAWSSWHKEDSIHVGVRCIEMLIESTGMVSLHRQNAGVVGQDSETIELAPEYAEAIATRAGALAGISPMFQPCVVPPKPWTGITGGGYWANGRRPLALVATHSKKALMRYEDVYMPEVYKAINIAQNTAWKINKKVLAVANVITKWKHCPVEDIPAIEREELPMKPEDIDMNPEALTAWKRAAAAVYRKDKARKSRRISLEFMLEQANKFANHKAIWFPYNMDWRGRVYAVSMFNPQGNDMTKGLLTLAKGKPIGKEGYYWLKIHGANCAGVDKVPFPERIKFIEENHENIMACAKSPLENTWWAEQDSPFCFLAFCFEYAGVQHHGLSYNCSLPLAFDGSCSGIQHFSAMLRDEVGGRAVNLLPSETVQDIYGIVAKKVNEILQADAINGTDNEVVTVTDENTGEISEKVKLGTKALAGQWLAYGVTRSVTKRSVMTLAYGSKEFGFRQQVLEDTIQPAIDSGKGLMFTQPNQAAGYMAKLIWESVSVTVVAAVEAMNWLKSAAKLLAAEVKDKKTGEILRKRCAVHWVTPDGFPVWQEYKKPIQTRLNLMFLGQFRLQPTINTNKDSEIDAHKQESGIAPNFVHSQDGSHLRKTVVWAHEKYGIESFALIHDSFGTIPADAANLFKAVRETMVDTYESCDVLADFYDQFADQLHESQLDKMPALPAKGNLNLRDILESDFAFA

SEQ ID NO: 91 - protein, 882 aa, synthetic construct
MNTINIAKNDFSDIELAAIPFNTLADHYGERLAREQLALEHESYEMGEARFRKMFERQLKAGEVADNAAAKPLITTLLPKMIARINDWFEEVKAKRGKRPTAFQFLQEIKPEAVAYITIKTTLACLTSADNTTVQAVASAIGRAIEDEARFGRIRDLEAKHFKKNVEEQLNKVGHVYKKAFMQVVEADMLSKGLLGGEAWSSWHKEDSIHVGVRCIEMLIESTGMVSLHRQNAGVVGQDSETIELAPEYAEAIATRAGALAGISPMFQPCVVPPKPWTGITGGGYWANGRRPLALVATHSKKALMRYEDVYMPEVYKAINIAQNTAWKINKKVLAVANVITKWKHCPVEDIPAIEREELPMKPEDIDMNPEALTAWKRAAAAVYRKDKARKSRRISLEFMLEQANKFANHKAIWFPYNMDWRGRVYAVSMFNPQGNDMTKGLLTLAKGKPIGKEGYYWLKIHGANCAGVDKVPFPERIKFIEENHENIMACAKSPLENTWWAEQDSPFCFLAFCFEYAGVQHHGLSYNCSLPLAFDGSCSGIQHFSAMLRDEVGGRAVNLLPSETVQDIYGIVAKKVNEILQADAINGTDNEVVTVTDENTGEISEKVKLGTKALAGQWLAYGVTRSVTKRSVMTLAYGSKEFGFRQQVLEDTIQPAIDSGKGLMFTQPNQAAGYMAKLIWESVSVTVVAAVEAMNWLKSAAKLLAAEVKDKKTGEILRKRCAVHWVTPDGFPVWQEYKKPIQTRLNLMFLGQFRLQPTINTNKDSEIDAHKQESGIAPNFVHSQDGSHLRKTVVWAHEKYGIESFALIHDSFGTIPADAANLFKAVRETMVDTYESCDVLADFYDQFADQLHESQLDKMPALPAKGNLNLRDILESDFAFA

SEQ ID NO: 92 - protein, 883 aa, synthetic construct
MNTINIAKNDFSDIELAAIPFNTLADHYGERLAREQLALEHESYEMGEARFRKMFERQLKAGEVADNAAAKPLITTLLPKMIARINDWFEEVKAKRGKRPTAFQFLQEIKPEAVAYITIKTTLACLTSADNTTVQAVASAIGRAIEDEARFGRIRDLEAKHFKKNVEEQLNKRVGHVYKKAFMQVVEADMLSKGLLGGEAWSSWHKEDSIHVGVRCIEMLIESTGMVSLHRQNAGVVGQDSETIELAPEYAEAIATRAGALAGISPMFQPCVVPPKPWTGITGGGYWANGRRPLALVATHSKKALMRYEDVYMPEVYKAINIAQNTAWKINKKVLAVANVITKWKHCPVEDIPAIEREELPMKPEDIDMNPEALTAWKRAAAAVYRSDKARKSRRISLEFMLEQANKFANHKAIWFPYNMDWRGRVYAVSMFNPQGNDMTKGLLTLAKGKPIGKEGYYWLKIHGANCAGVDKVPFPERIKFIEENHENIMACAKSPLENTWWAEQDSPFCFLAFCFEYAGVQHHGLSYNCSLPLAFDGSCSGIQHFSAMLRDEVGGRAVNLLPSETVQDIYGIVAKKVNEILQADAINGTDNEVVTVTDENTGEISEKVKLGTKALAGQWLAYGVTRSVTKRSVMTLAYGSKEFGFRQQVLEDTIQPAIDSGKGLMFTQPNQAAGYMAKLIWESVSVTVVAAVEAMNWLKSAAKLLAAEVKDKKTGEILRKRCAVHWVTPDGFPVWQEYKKPIQTRLNLMFLGQFRLQPTINTNKDSEIDAHKQESGIAPNFVHSQDGSHLRKTVVWAHEKYGIESFALIHDSFGTIPADAANLFKAVRETMVDTYESCDVLADFYDQFADQLHESQLDKMPALPAKGNLNLRDILESDFAFA

SEQ ID NO: 93 - protein, 883 aa, synthetic construct
MNTINIAKNDFSDIELAAIPFNTLADHYGERLAREQLALEHESYEMGEARFRKMFERQLKAGEVADNAAAKPLITTLLPKMIARINDWFEEVKAKRGKRPTAFQFLQEIKPEAVAYITIKTTLACLTSADNTTVQAVASAIGRAIEDEARFGRIRDLEAKHFKKNVEEQLNKRVGHVYKKAFMQVVEADMLSKGLLGGEAWSSWHKEDSIHVGVRCIEMLIESTGMVSLHRQNAGVVGQDSETIELAPEYAEAIATRAGALAGISPMFQPCVVPPKPWTGITGGGYWANGRRPLALVATHSKKALMRYEDVYMPEVYKAINIAQNTAWKINKKVLAVANVITKWKHCPVEDIPAIEREELPMKPEDIDMNPEALTAWKRAAAAVYRYDKARKSRRISLEFMLEQANKFANHKAIWFPYNMDWRGRVYAVSMFNPQGNDMTKGLLTLAKGKPIGKEGYYWLKIHGANCAGVDKVPFPERIKFIEENHENIMACAKSPLENTWWAEQDSPFCFLAFCFEYAGVQHHGLSYNCSLPLAFDGSCSGIQHFSAMLRDEVGGRAVNLLPSETVQDIYGIVAKKVNEILQADAINGTDNEVVTVTDENTGEISEKVKLGTKALAGQWLAYGVTRSVTKRSVMTLAYGSKEFGFRQQVLEDTIQPAIDSGKGLMFTQPNQAAGYMAKLIWESVSVTVVAAVEAMNWLKSAAKLLAAEVKDKKTGEILRKRCAVHWVTPDGFPVWQEYKKPIQTRLNLMFLGQFRLQPTINTNKDSEIDAHKQESGIAPNFVHSQDGSHLRKTVVWAHEKYGIESFALIHDSFGTIPADAANLFKAVRETMVDTYESCDVLADFYDQFADQLHESQLDKMPALPAKGNLNLRDILESDFAFA

SEQ ID NO: 94 - protein, 883 aa, synthetic construct
MNTINIAKNDFSDIELAAIPFNTLADHYGERLAREQLALEHESYEMGEARFRKMFERQLKAGEVADNAAAKPLITTLLPKMIARINDWFEEVKAKRGKRPTAFQFLQEIKPEAVAYITIKTTLACLTSADNTTVQAVASAIGRAIEDEARFGRIRDLEAKHFKKNVEEQLNKRVGHVYKKAFMQVVEADMLSKGLLGGEAWSSWHKEDSIHVGVRCIEMLIESTGMVSLHRQNAGVVGQDSETIELAPEYAEAIATRAGALAGISPMFQPCVVPPKPWTGITGGGYWANGRRPLALVATHSKKALMRYEDVYMPEVYKAINIAQNTAWKINKKVLAVANVITKWKHCPVEDIPAIEREELPMKPEDIDMNPEALTAWKRAAAAVARKDKARKSRRISLEFMLEQANKFANHKAIWFPYNMDWRGRVYAVSMFNPQGNDMTKGLLTLAKGKPIGKEGYYWLKIHGANCAGVDKVPFPERIKFIEENHENIMACAKSPLENTWWAEQDSPFCFLAFCFEYAGVQHHGLSYNCSLPLAFDGSCSGIQHFSAMLRDEVGGRAVNLLPSETVQDIYGIVAKKVNEILQADAINGTDNEVVTVTDENTGEISEKVKLGTKALAGQWLAYGVTRSVTKRSVMTLAYGSKEFGFRQQVLEDTIQPAIDSGKGLMFTQPNQAAGYMAKLIWESVSVTVVAAVEAMNWLKSAAKLLAAEVKDKKTGEILRKRCAVHWVTPDGFPVWQEYKKPIQTRLNLMFLGQFRLQPTINTNKDSEIDAHKQESGIAPNFVHSQDGSHLRKTVVWAHEKYGIESFALIHDSFGTIPADAANLFKAVRETMVDTYESCDVLADFYDQFADQLHESQLDKMPALPAKGNLNLRDILESDFAFA

SEQ ID NO: 95 - protein, 883 aa, synthetic construct
MNTINIAKNDFSDIELAAIPFNTLADHYGERLAREQLALEHESYEMGEARFRKMFERQLKAGEVADNAAAKPLITTLLPKMIARINDWFEEVKAKRGKRPTAFQFLQEIKPEAVAYITIKTTLACLTSADNTTVQAVASAIGRAIEDEARFGRIRDLEAKHFKKNVEEQLNKRVGHVYKKAFMQVVEADMLSKGLLGGEAWSSWHKEDSIHVGVRCIEMLIESTGMVSLHRQNAGVVGQDSETIELAPEYAEAIATRAGALAGISPMFQPCVVPPKPWTGITGGGYWANGRRPLALVATHSKKALMRYEDVYMPEVYKAINIAQNTAWKINKKVLAVANVITKWKHCPVEDIPAIEREELPMKPEDIDMNPEALTAWKRAAAAVYRKAKARKSRRISLEFMLEQANKFANHKAIWFPYNMDWRGRVYAVSMFNPQGNDMTKGLLTLAKGKPIGKEGYYWLKIHGANCAGVDKVPFPERIKFIEENHENIMACAKSPLENTWWAEQDSPFCFLAFCFEYAGVQHHGLSYNCSLPLAFDGSCSGIQHFSAMLRDEVGGRAVNLLPSETVQDIYGIVAKKVNEILQADAINGTDNEVVTVTDENTGEISEKVKLGTKALAGQWLAYGVTRSVTKRSVMTLAYGSKEFGFRQQVLEDTIQPAIDSGKGLMFTQPNQAAGYMAKLIWESVSVTVVAAVEAMNWLKSAAKLLAAEVKDKKTGEILRKRCAVHWVTPDGFPVWQEYKKPIQTRLNLMFLGQFRLQPTINTNKDSEIDAHKQESGIAPNFVHSQDGSHLRKTVVWAHEKYGIESFALIHDSFGTIPADAANLFKAVRETMVDTYESCDVLADFYDQFADQLHESQLDKMPALPAKGNLNLRDILESDFAFA

SEQ ID NO: 96 - protein, 882 aa, synthetic construct
MNTINIAKNDFSDIELAAIPFNTLADHYGERLAREQLALEHESYEMGEARFRKMFERQLKAGEVADNAAAKPLITTLLPKMIARINDWFEEVKAKRGKRPTAFQFLQEIKPEAVAYITIKTTLACLTSADNTTVQAVASAIGRAIEDEARFGRIRDLEAKHFKKNVEEQLNRVGHVYKKAFMQVVEADMLSKGLLGGEAWSSWHKEDSIHVGVRCIEMLIESTGMVSLHRQNAGVVGQDSETIELAPEYAEAIATRAGALAGISPMFQPCVVPPKPWTGITGGGYWANGRRPLALVATHSKKALMRYEDVYMPEVYKAINIAQNTAWKINKKVLAVANVITKWKHCPVEDIPAIEREELPMKPEDIDMNPEALTAWKRAAAAVYRSDKARKSRRISLEFMLEQANKFANHKAIWFPYNMDWRGRVYAVSMFNPQGNDMTKGLLTLAKGKPIGKEGYYWLKIHGANCAGVDKVPFPERIKFIEENHENIMACAKSPLENTWWAEQDSPFCFLAFCFEYAGVQHHGLSYNCSLPLAFDGSCSGIQHFSAMLRDEVGGRAVNLLPSETVQDIYGIVAKKVNEILQADAINGTDNEVVTVTDENTGEISEKVKLGTKALAGQWLAYGVTRSVTKRSVMTLAYGSKEFGFRQQVLEDTIQPAIDSGKGLMFTQPNQAAGYMAKLIWESVSVTVVAAVEAMNWLKSAAKLLAAEVKDKKTGEILRKRCAVHWVTPDGFPVWQEYKKPIQTRLNLMFLGQFRLQPTINTNKDSEIDAHKQESGIAPNFVHSQDGSHLRKTVVWAHEKYGIESFALIHDSFGTIPADAANLFKAVRETMVDTYESCDVLADFYDQFADQLHESQLDKMPALPAKGNLNLRDILESDFAFA

SEQ ID NO: 97 - protein, 883 aa, synthetic construct
MNTINIAKNDFSDIELAAIPFNTLADHYGERLAREQLALEHESYEMGEARFRKMFERQLKAGEVADNAAAKPLITTLLPKMIARINDWFEEVKAKRGKRPTAFQFLQEIKPEAVAYITIKTTLACLTSADNTTVQAVASAIGRAIEDEARFGRIRDLEAKHFKKNVEEQLNKRVGHVYKKAFMQVVEADMLSKGLLGGEAWSSWHKEDSIHVGVRCIEMLIESTGMVSLHRQNAGVVGQDSETIELAPEYAEAIATRAGALAGISPMFQPCVVPPKPWTGITGGGYWANGRRPLALVRTHSKKALMRYEDVYMPEVYKAINIAQNTAWKINKKVLAVANVITKWKHCPVEDIPAIEREELPMKPEDIDMNPEALTAWKRAAAAVARYDKARKSRRISLEFMLEQANKFANHKAIWFPYNMDWRGRVYAVSMFNPQGNDMTKGLLTLAKGKPIGKEGYYWLKIHGANCAGVDKVPFPERIKFIEENHENIMACAKSPLENTWWAEQDSPFCFLAFCFEYAGVQHHGLSYNCSLPLAFDGSCSGIQHFSAMLRDEVGGRAVNLLPSETVQDIYGIVAKKVNEILQADAINGTDNEVVTVTDENTGEISEKVKLGTKALAGQWLAYGVTRSVTKRSVMTLAYGSKEFGFRQQVLEDTIQPAIDSGKGLMFTQPNQAAGYMAKLIWESVSVTVVAAVEAMNWLKSAAKLLAAEVKDKKTGEILRKRCAVHWVTPDGFPVWQEYKKPIQTRLNLMFLGQFRLQPTINTNKDSEIDAHKQESGIAPNFVHSQDGSHLRKTVVWAHEKYGIESFALIHDSFGTIPADAANLFKAVRETMVDTYESCDVLADFYDQFADQLHESQLDKMPALPAKGNLNLRDILESDFAFA

SEQ ID NO: 98 - protein, 883 aa, synthetic construct
MNTINIAKNDFSDIELAAIPFNTLADHYGERLAREQLALEHESYEMGEARFRKMFERQLKAGEVADNAAAKPLITTLLPKMIARINDWFEEVKAKRGKRPTAFQFLQEIKPEAVAYITIKTTLACLTSADNTTVQAVASAIGRAIEDEARFGRIRDLEAKHFKKNVEEQLNKRVGHVYKKAFMQVVEADMLSKGLLGGEAWSSWHKEDSIHVGVRCIEMLIESTGMVSLHRQNAGVVGQDSETIELAPEYAEAIATRAGALAGISPMFQPCVVPPKPWTGITGGGYWANGRRPLALVRTHSKKALMRYEDVYMPEVYKAINIAQNTAWKINKKVLAVANVITKWKHCPVEDIPAIEREELPMKPEDIDMNPEALTAWKRAAAAVARSDKARKSRRISLEFMLEQANKFANHKAIWFPYNMDWRGRVYAVSMFNPQGNDMTKGLLTLAKGKPIGKEGYYWLKIHGANCAGVDKVPFPERIKFIEENHENIMACAKSPLENTWWAEQDSPFCFLAFCFEYAGVQHHGLSYNCSLPLAFDGSCSGIQHFSAMLRDEVGGRAVNLLPSETVQDIYGIVAKKVNEILQADAINGTDNEVVTVTDENTGEISEKVKLGTKALAGQWLAYGVTRSVTKRSVMTLAYGSKEFGFRQQVLEDTIQPAIDSGKGLMFTQPNQAAGYMAKLIWESVSVTVVAAVEAMNWLKSAAKLLAAEVKDKKTGEILRKRCAVHWVTPDGFPVWQEYKKPIQTRLNLMFLGQFRLQPTINTNKDSEIDAHKQESGIAPNFVHSQDGSHLRKTVVWAHEKYGIESFALIHDSFGTIPADAANLFKAVRETMVDTYESCDVLADFYDQFADQLHESQLDKMPALPAKGNLNLRDILESDFAFA

SEQ ID NO: 99 - protein, 883 aa, synthetic construct
MNTINIAKNDFSDIELAAIPFNTLADHYGERLAREQLALEHESYEMGEARFRKMFERQLKAGEVADNAAAKPLITTLLPKMIARINDWFEEVKAKRGKRPTAFQFLQEIKPEAVAYITIKTTLACLTSADNTTVQAVASAIGRAIEDEARFGRIRDLEAKHFKKNVEEQLNKRVGHVYKKAFMQVVEADMLSKGLLGGEAWSSWHKEDSIHVGVRCIEMLIESTGMVSLHRQNAGVVGQDSETIELAPEYAEAIATRAGALAGISPMFQPCVVPPKPWTGITGGGYWANGRRPLALVRTHSKKALMRYEDVYMPEVYKAINIAQNTAWKINKKVLAVANVITKWKHCPVEDIPAIEREELPMKPEDIDMNPEALTAWKRAAAAVARKGKARKSRRISLEFMLEQANKFANHKAIWFPYNMDWRGRVYAVSMFNPQGNDMTKGLLTLAKGKPIGKEGYYWLKIHGANCAGVDKVPFPERIKFIEENHENIMACAKSPLENTWWAEQDSPFCFLAFCFEYAGVQHHGLSYNCSLPLAFDGSCSGIQHFSAMLRDEVGGRAVNLLPSETVQDIYGIVAKKVNEILQADAINGTDNEVVTVTDENTGEISEKVKLGTKALAGQWLAYGVTRSVTKRSVMTLAYGSKEFGFRQQVLEDTIQPAIDSGKGLMFTQPNQAAGYMAKLIWESVSVTVVAAVEAMNWLKSAAKLLAAEVKDKKTGEILRKRCAVHWVTPDGFPVWQEYKKPIQTRLNLMFLGQFRLQPTINTNKDSEIDAHKQESGIAPNFVHSQDGSHLRKTVVWAHEKYGIESFALIHDSFGTIPADAANLFKAVRETMVDTYESCDVLADFYDQFADQLHESQLDKMPALPAKGNLNLRDILESDFAFA

SEQ ID NO: 100 - protein, 883 aa, synthetic construct
MNTINIAKNDFSDIELAAIPFNTLADHYGERLAREQLALEHESYEMGEARFRKMFERQLKAGEVADNAAAKPLITTLLPKMIARINDWFEEVKAKRGKRPTAFQFLQEIKPEAVAYITIKTTLACLTSADNTTVQAVASAIGRAIEDEARFGRIRDLEAKHFKKNVEEQLNKRVGHVYKKAFMQVVEADMLSKGLLGGEAWSSWHKEDSIHVGVRCIEMLIESTGMVSLHRQNAGVVGQDSETIELAPEYAEAIATRAGALAGISPMFQPCVVPPKPWTGITGGGYWANGRRPLALVRTHSKKALMRYEDVYMPEVYKAINIAQNTAWKINKKVLAVANVITKWKHCPVEDIPAIEREELPMKPEDIDMNPEALTAWKRAAAAVYRYAKARKSRRISLEFMLEQANKFANHKAIWFPYNMDWRGRVYAVSMFNPQGNDMTKGLLTLAKGKPIGKEGYYWLKIHGANCAGVDKVPFPERIKFIEENHENIMACAKSPLENTWWAEQDSPFCFLAFCFEYAGVQHHGLSYNCSLPLAFDGSCSGIQHFSAMLRDEVGGRAVNLLPSETVQDIYGIVAKKVNEILQADAINGTDNEVVTVTDENTGEISEKVKLGTKALAGQWLAYGVTRSVTKRSVMTLAYGSKEFGFRQQVLEDTIQPAIDSGKGLMFTQPNQAAGYMAKLIWESVSVTVVAAVEAMNWLKSAAKLLAAEVKDKKTGEILRKRCAVHWVTPDGFPVWQEYKKPIQTRLNLMFLGQFRLQPTINTNKDSEIDAHKQESGIAPNFVHSQDGSHLRKTVVWAHEKYGIESFALIHDSFGTIPADAANLFKAVRETMVDTYESCDVLADFYDQFADQLHESQLDKMPALPAKGNLNLRDILESDFAFA

SEQ ID NO: 101 - protein, 883 aa, synthetic construct
MNTINIAKNDFSDIELAAIPFNTLADHYGERLAREQLALEHESYEMGEARFRKMFERQLKAGEVADNAAAKPLITTLLPKMIARINDWFEEVKAKRGKRPTAFQFLQEIKPEAVAYITIKTTLACLTSADNTTVQAVASAIGRAIEDEARFGRIRDLEAKHFKKNVEEQLNKRVGHVYKKAFMQVVEADMLSKGLLGGEAWSSWHKEDSIHVGVRCIEMLIESTGMVSLHRQNAGVVGQDSETIELAPEYAEAIATRAGALAGISPMFQPCVVPPKPWTGITGGGYWANGRRPLALVRTHSKKALMRYEDVYMPEVYKAINIAQNTAWKINKKVLAVANVITKWKHCPVEDIPAIEREELPMKPEDIDMNPEALTAWKRAAAAVYRYGKARKSRRISLEFMLEQANKFANHKAIWFPYNMDWRGRVYAVSMFNPQGNDMTKGLLTLAKGKPIGKEGYYWLKIHGANCAGVDKVPFPERIKFIEENHENIMACAKSPLENTWWAEQDSPFCFLAFCFEYAGVQHHGLSYNCSLPLAFDGSCSGIQHFSAMLRDEVGGRAVNLLPSETVQDIYGIVAKKVNEILQADAINGTDNEVVTVTDENTGEISEKVKLGTKALAGQWLAYGVTRSVTKRSVMTLAYGSKEFGFRQQVLEDTIQPAIDSGKGLMFTQPNQAAGYMAKLIWESVSVTVVAAVEAMNWLKSAAKLLAAEVKDKKTGEILRKRCAVHWVTPDGFPVWQEYKKPIQTRLNLMFLGQFRLQPTINTNKDSEIDAHKQESGIAPNFVHSQDGSHLRKTVVWAHEKYGIESFALIHDSFGTIPADAANLFKAVRETMVDTYESCDVLADFYDQFADQLHESQLDKMPALPAKGNLNLRDILESDFAFA

SEQ ID NO: 102 - protein, 883 aa, synthetic construct
MNTINIAKNDFSDIELAAIPFNTLADHYGERLAREQLALEHESYEMGEARFRKMFERQLKAGEVADNAAAKPLITTLLPKMIARINDWFEEVKAKRGKRPTAFQFLQEIKPEAVAYITIKTTLACLTSADNTTVQAVASAIGRAIEDEARFGRIRDLEAKHFKKNVEEQLNKRVGHVYKKAFMQVVEADMLSKGLLGGEAWSSWHKEDSIHVGVRCIEMLIESTGMVSLHRQNAGVVGQDSETIELAPEYAEAIATRAGALAGISPMFQPCVVPPKPWTGITGGGYWANGRRPLALVRTHSKKALMRYEDVYMPEVYKAINIAQNTAWKINKKVLAVANVITKWKHCPVEDIPAIEREELPMKPEDIDMNPEALTAWKRAAAAVYRSAKARKSRRISLEFMLEQANKFANHKAIWFPYNMDWRGRVYAVSMFNPQGNDMTKGLLTLAKGKPIGKEGYYWLKIHGANCAGVDKVPFPERIKFIEENHENIMACAKSPLENTWWAEQDSPFCFLAFCFEYAGVQHHGLSYNCSLPLAFDGSCSGIQHFSAMLRDEVGGRAVNLLPSETVQDIYGIVAKKVNEILQADAINGTDNEVVTVTDENTGEISEKVKLGTKALAGQWLAYGVTRSVTKRSVMTLAYGSKEFGFRQQVLEDTIQPAIDSGKGLMFTQPNQAAGYMAKLIWESVSVTVVAAVEAMNWLKSAAKLLAAEVKDKKTGEILRKRCAVHWVTPDGFPVWQEYKKPIQTRLNLMFLGQFRLQPTINTNKDSEIDAHKQESGIAPNFVHSQDGSHLRKTVVWAHEKYGIESFALIHDSFGTIPADAANLFKAVRETMVDTYESCDVLADFYDQFADQLHESQLDKMPALPAKGNLNLRDILESDFAFA

SEQ ID NO: 103 - protein, 883 aa, synthetic construct
MNTINIAKNDFSDIELAAIPFNTLADHYGERLAREQLALEHESYEMGEARFRKMFERQLKAGEVADNAAAKPLITTLLPKMIARINDWFEEVKAKRGKRPTAFQFLQEIKPEAVAYITIKTTLACLTSADNTTVQAVASAIGRAIEDEARFGRIRDLEAKHFKKNVEEQLNKRVGHVYKKAFMQVVEADMLSKGLLGGEAWSSWHKEDSIHVGVRCIEMLIESTGMVSLHRQNAGVVGQDSETIELAPEYAEAIATRAGALAGISPMFQPCVVPPKPWTGITGGGYWANGRRPLALVRTHSKKALMRYEDVYMPEVYKAINIAQNTAWKINKKVLAVANVITKWKHCPVEDIPAIEREELPMKPEDIDMNPEALTAWKRAAAAVARYGKARKSRRISLEFMLEQANKFANHKAIWFPYNMDWRGRVYAVSMFNPQGNDMTKGLLTLAKGKPIGKEGYYWLKIHGANCAGVDKVPFPERIKFIEENHENIMACAKSPLENTWWAEQDSPFCFLAFCFEYAGVQHHGLSYNCSLPLAFDGSCSGIQHFSAMLRDEVGGRAVNLLPSETVQDIYGIVAKKVNEILQADAINGTDNEVVTVTDENTGEISEKVKLGTKALAGQWLAYGVTRSVTKRSVMTLAYGSKEFGFRQQVLEDTIQPAIDSGKGLMFTQPNQAAGYMAKLIWESVSVTVVAAVEAMNWLKSAAKLLAAEVKDKKTGEILRKRCAVHWVTPDGFPVWQEYKKPIQTRLNLMFLGQFRLQPTINTNKDSEIDAHKQESGIAPNFVHSQDGSHLRKTVVWAHEKYGIESFALIHDSFGTIPADAANLFKAVRETMVDTYESCDVLADFYDQFADQLHESQLDKMPALPAKGNLNLRDILESDFAFA

SEQ ID NO: 104 - protein, 883 aa, synthetic construct
MNTINIAKNDFSDIELAAIPFNTLADHYGERLAREQLALEHESYEMGEARFRKMFERQLKAGEVADNAAAKPLITTLLPKMIARINDWFEEVKAKRGKRPTAFQFLQEIKPEAVAYITIKTTLACLTSADNTTVQAVASAIGRAIEDEARFGRIRDLEAKHFKKNVEEQLNKRVGHVYKKAFMQVVEADMLSKGLLGGEAWSSWHKEDSIHVGVRCIEMLIESTGMVSLHRQNAGVVGQDSETIELAPEYAEAIATRAGALAGISPMFQPCVVPPKPWTGITGGGYWANGRRPLALVRTHSKKALMRYEDVYMPEVYKAINIAQNTAWKINKKVLAVANVITKWKHCPVEDIPAIEREELPMKPEDIDMNPEALTAWKRAAAAVARSGKARKSRRISLEFMLEQANKFANHKAIWFPYNMDWRGRVYAVSMFNPQGNDMTKGLLTLAKGKPIGKEGYYWLKIHGANCAGVDKVPFPERIKFIEENHENIMACAKSPLENTWWAEQDSPFCFLAFCFEYAGVQHHGLSYNCSLPLAFDGSCSGIQHFSAMLRDEVGGRAVNLLPSETVQDIYGIVAKKVNEILQADAINGTDNEVVTVTDENTGEISEKVKLGTKALAGQWLAYGVTRSVTKRSVMTLAYGSKEFGFRQQVLEDTIQPAIDSGKGLMFTQPNQAAGYMAKLIWESVSVTVVAAVEAMNWLKSAAKLLAAEVKDKKTGEILRKRCAVHWVTPDGFPVWQEYKKPIQTRLNLMFLGQFRLQPTINTNKDSEIDAHKQESGIAPNFVHSQDGSHLRKTVVWAHEKYGIESFALIHDSFGTIPADAANLFKAVRETMVDTYESCDVLADFYDQFADQLHESQLDKMPALPAKGNLNLRDILESDFAFA

SEQ ID NO: 105 - protein, 883 aa, synthetic construct
MNTINIAKNDFSDIELAAIPFNTLADHYGERLAREQLALEHESYEMGEARFRKMFERQLKAGEVADNAAAKPLITTLLPKMIARINDWFEEVKAKRGKRPTAFQFLQEIKPEAVAYITIKTTLACLTSADNTTVQAVASAIGRAIEDEARFGRIRDLEAKHFKKNVEEQLNKRVGHVYKKAFMQVVEADMLSKGLLGGEAWSSWHKEDSIHVGVRCIEMLIESTGMVSLHRQNAGVVGQDSETIELAPEYAEAIATRAGALAGISPMFQPCVVPPKPWTGITGGGYWANGRRPLALVRTHSKKALMRYEDVYMPEVYKAINIAQNTAWKINKKVLAVANVITKWKHCPVEDIPAIEREELPMKPEDIDMNPEALTAWKRAAAAVARYAKARKSRRISLEFMLEQANKFANHKAIWFPYNMDWRGRVYAVSMFNPQGNDMTKGLLTLAKGKPIGKEGYYWLKIHGANCAGVDKVPFPERIKFIEENHENIMACAKSPLENTWWAEQDSPFCFLAFCFEYAGVQHHGLSYNCSLPLAFDGSCSGIQHFSAMLRDEVGGRAVNLLPSETVQDIYGIVAKKVNEILQADAINGTDNEVVTVTDENTGEISEKVKLGTKALAGQWLAYGVTRSVTKRSVMTLAYGSKEFGFRQQVLEDTIQPAIDSGKGLMFTQPNQAAGYMAKLIWESVSVTVVAAVEAMNWLKSAAKLLAAEVKDKKTGEILRKRCAVHWVTPDGFPVWQEYKKPIQTRLNLMFLGQFRLQPTINTNKDSEIDAHKQESGIAPNFVHSQDGSHLRKTVVWAHEKYGIESFALIHDSFGTIPADAANLFKAVRETMVDTYESCDVLADFYDQFADQLHESQLDKMPALPAKGNLNLRDILESDFAFA

SEQ ID NO: 106 - protein, 883 aa, synthetic construct
MNTINIAKNDFSDIELAAIPFNTLADHYGERLAREQLALEHESYEMGEARFRKMFERQLKAGEVADNAAAKPLITTLLPKMIARINDWFEEVKAKRGKRPTAFQFLQEIKPEAVAYITIKTTLACLTSADNTTVQAVASAIGRAIEDEARFGRIRDLEAKHFKKNVEEQLNKRVGHVYKKAFMQVVEADMLSKGLLGGEAWSSWHKEDSIHVGVRCIEMLIESTGMVSLHRQNAGVVGQDSETIELAPEYAEAIATRAGALAGISPMFQPCVVPPKPWTGITGGGYWANGRRPLALVRTHSKKALMRYEDVYMPEVYKAINIAQNTAWKINKKVLAVANVITKWKHCPVEDIPAIEREELPMKPEDIDMNPEALTAWKRAAAAVARSAKARKSRRISLEFMLEQANKFANHKAIWFPYNMDWRGRVYAVSMFNPQGNDMTKGLLTLAKGKPIGKEGYYWLKIHGANCAGVDKVPFPERIKFIEENHENIMACAKSPLENTWWAEQDSPFCFLAFCFEYAGVQHHGLSYNCSLPLAFDGSCSGIQHFSAMLRDEVGGRAVNLLPSETVQDIYGIVAKKVNEILQADAINGTDNEVVTVTDENTGEISEKVKLGTKALAGQWLAYGVTRSVTKRSVMTLAYGSKEFGFRQQVLEDTIQPAIDSGKGLMFTQPNQAAGYMAKLIWESVSVTVVAAVEAMNWLKSAAKLLAAEVKDKKTGEILRKRCAVHWVTPDGFPVWQEYKKPIQTRLNLMFLGQFRLQPTINTNKDSEIDAHKQESGIAPNFVHSQDGSHLRKTVVWAHEKYGIESFALIHDSFGTIPADAANLFKAVRETMVDTYESCDVLADFYDQFADQLHESQLDKMPALPAKGNLNLRDILESDFAFA

SEQ ID NO: 107 - protein, 883 aa, synthetic construct
MNTINIAKNDFSDIELAAIPFNTLADHYGERLAREQLALEHESYEMGEARFRKMFERQLKAGEVADNAAAKPLITTLLPKMIARINDWFEEVKAKRGKRPTAFQFLQEIKPEAVAYITIKTTLACLTSADNTTVQAVASAIGRAIEDEARFGRIRDLEAKHFKKNVEEQLNHRVGHVYKKAFMQVVEADMLSKGLLGGEAWSSWHKEDSIHVGVRCIEMLIESTGMVSLHRQNAGVVGQDSETIELAPEYAEAIATRAGALAGISPMFQPCVVPPKPWTGITGGGYWANGRRPLALVRTHSKKALMRYEDVYMPEVYKAINIAQNTAWKINKKVLAVANVITKWKHCPVEDIPAIEREELPMKPEDIDMNPEALTAWKRAAAAVYRKDKARKSRRISLEFMLEQANKFANHKAIWFPYNMDWRGRVYAVSMFNPQGNDMTKGLLTLAKGKPIGKEGYYWLKIHGANCAGVDKVPFPERIKFIEENHENIMACAKSPLENTWWAEQDSPFCFLAFCFEYAGVQHHGLSYNCSLPLAFDGSCSGIQHFSAMLRDEVGGRAVNLLPSETVQDIYGIVAKKVNEILQADAINGTDNEVVTVTDENTGEISEKVKLGTKALAGQWLAYGVTRSVTKRSVMTLAYGSKEFGFRQQVLEDTIQPAIDSGKGLMFTQPNQAAGYMAKLIWESVSVTVVAAVEAMNWLKSAAKLLAAEVKDKKTGEILRKRCAVHWVTPDGFPVWQEYKKPIQTRLNLMFLGQFRLQPTINTNKDSEIDAHKQESGIAPNFVHSQDGSHLRKTVVWAHEKYGIESFALIHDSFGTIPADAANLFKAVRETMVDTYESCDVLADFYDQFADQLHESQLDKMPALPAKGNLNLRDILESDFAFA

SEQ ID NO: 108 - protein, 883 aa, synthetic construct
MNTINIAKNDFSDIELAAIPFNTLADHYGERLAREQLALEHESYEMGEARFRKMFERQLKAGEVADNAAAKPLITTLLPKMIARINDWFEEVKAKRGKRPTAFQFLQEIKPEAVAYITIKTTLACLTSADNTTVQAVASAIGRAIEDEARFGRIRDLEAKHFKKNVEEQLNYRVGHVYKKAFMQVVEADMLSKGLLGGEAWSSWHKEDSIHVGVRCIEMLIESTGMVSLHRQNAGVVGQDSETIELAPEYAEAIATRAGALAGISPMFQPCVVPPKPWTGITGGGYWANGRRPLALVRTHSKKALMRYEDVYMPEVYKAINIAQNTAWKINKKVLAVANVITKWKHCPVEDIPAIEREELPMKPEDIDMNPEALTAWKRAAAAVYRKDKARKSRRISLEFMLEQANKFANHKAIWFPYNMDWRGRVYAVSMFNPQGNDMTKGLLTLAKGKPIGKEGYYWLKIHGANCAGVDKVPFPERIKFIEENHENIMACAKSPLENTWWAEQDSPFCFLAFCFEYAGVQHHGLSYNCSLPLAFDGSCSGIQHFSAMLRDEVGGRAVNLLPSETVQDIYGIVAKKVNEILQADAINGTDNEVVTVTDENTGEISEKVKLGTKALAGQWLAYGVTRSVTKRSVMTLAYGSKEFGFRQQVLEDTIQPAIDSGKGLMFTQPNQAAGYMAKLIWESVSVTVVAAVEAMNWLKSAAKLLAAEVKDKKTGEILRKRCAVHWVTPDGFPVWQEYKKPIQTRLNLMFLGQFRLQPTINTNKDSEIDAHKQESGIAPNFVHSQDGSHLRKTVVWAHEKYGIESFALIHDSFGTIPADAANLFKAVRETMVDTYESCDVLADFYDQFADQLHESQLDKMPALPAKGNLNLRDILESDFAFA

SEQ ID NO: 109 - protein, 883 aa, synthetic construct
MNTINIAKNDFSDIELAAIPFNTLADHYGERLAREQLALEHESYEMGEARFRKMFERQLKAGEVADNAAAKPLITTLLPKMIARINDWFEEVKAKRGKRPTAFQFLQEIKPEAVAYITIKTTLACLTSADNTTVQAVASAIGRAIEDEARFGRIRDLEAKHFKKNVEEQLNSRVGHVYKKAFMQVVEADMLSKGLLGGEAWSSWHKEDSIHVGVRCIEMLIESTGMVSLHRQNAGVVGQDSETIELAPEYAEAIATRAGALAGISPMFQPCVVPPKPWTGITGGGYWANGRRPLALVRTHSKKALMRYEDVYMPEVYKAINIAQNTAWKINKKVLAVANVITKWKHCPVEDIPAIEREELPMKPEDIDMNPEALTAWKRAAAAVYRKDKARKSRRISLEFMLEQANKFANHKAIWFPYNMDWRGRVYAVSMFNPQGNDMTKGLLTLAKGKPIGKEGYYWLKIHGANCAGVDKVPFPERIKFIEENHENIMACAKSPLENTWWAEQDSPFCFLAFCFEYAGVQHHGLSYNCSLPLAFDGSCSGIQHFSAMLRDEVGGRAVNLLPSETVQDIYGIVAKKVNEILQADAINGTDNEVVTVTDENTGEISEKVKLGTKALAGQWLAYGVTRSVTKRSVMTLAYGSKEFGFRQQVLEDTIQPAIDSGKGLMFTQPNQAAGYMAKLIWESVSVTVVAAVEAMNWLKSAAKLLAAEVKDKKTGEILRKRCAVHWVTPDGFPVWQEYKKPIQTRLNLMFLGQFRLQPTINTNKDSEIDAHKQESGIAPNFVHSQDGSHLRKTVVWAHEKYGIESFALIHDSFGTIPADAANLFKAVRETMVDTYESCDVLADFYDQFADQLHESQLDKMPALPAKGNLNLRDILESDFAFA

SEQ ID NO: 110 - protein, 883 aa, synthetic construct
MNTINIAKNDFSDIELAAIPFNTLADHYGERLAREQLALEHESYEMGEARFRKMFERQLKAGEVADNAAAKPLITTLLPKMIARINDWFEEVKAKRGKRPTAFQFLQEIKPEAVAYITIKTTLACLTSADNTTVQAVASAIGRAIEDEARFGRIRDLEAKHFKKNVEEQLNWRVGHVYKKAFMQVVEADMLSKGLLGGEAWSSWHKEDSIHVGVRCIEMLIESTGMVSLHRQNAGVVGQDSETIELAPEYAEAIATRAGALAGISPMFQPCVVPPKPWTGITGGGYWANGRRPLALVRTHSKKALMRYEDVYMPEVYKAINIAQNTAWKINKKVLAVANVITKWKHCPVEDIPAIEREELPMKPEDIDMNPEALTAWKRAAAAVYRKDKARKSRRISLEFMLEQANKFANHKAIWFPYNMDWRGRVYAVSMFNPQGNDMTKGLLTLAKGKPIGKEGYYWLKIHGANCAGVDKVPFPERIKFIEENHENIMACAKSPLENTWWAEQDSPFCFLAFCFEYAGVQHHGLSYNCSLPLAFDGSCSGIQHFSAMLRDEVGGRAVNLLPSETVQDIYGIVAKKVNEILQADAINGTDNEVVTVTDENTGEISEKVKLGTKALAGQWLAYGVTRSVTKRSVMTLAYGSKEFGFRQQVLEDTIQPAIDSGKGLMFTQPNQAAGYMAKLIWESVSVTVVAAVEAMNWLKSAAKLLAAEVKDKKTGEILRKRCAVHWVTPDGFPVWQEYKKPIQTRLNLMFLGQFRLQPTINTNKDSEIDAHKQESGIAPNFVHSQDGSHLRKTVVWAHEKYGIESFALIHDSFGTIPADAANLFKAVRETMVDTYESCDVLADFYDQFADQLHESQLDKMPALPAKGNLNLRDILESDFAFA

SEQ ID NO: 111 - protein, 883 aa, synthetic construct
MNTINIAKNDFSDIELAAIPFNTLADHYGERLAREQLALEHESYEMGEARFRKMFERQLKAGEVADNAAAKPLITTLLPKMIARINDWFEEVKAKRGKRPTAFQFLQEIKPEAVAYITIKTTLACLTSADNTTVQAVASAIGRAIEDEARFGRIRDLEAKHFKKNVEEQLNFRVGHVYKKAFMQVVEADMLSKGLLGGEAWSSWHKEDSIHVGVRCIEMLIESTGMVSLHRQNAGVVGQDSETIELAPEYAEAIATRAGALAGISPMFQPCVVPPKPWTGITGGGYWANGRRPLALVRTHSKKALMRYEDVYMPEVYKAINIAQNTAWKINKKVLAVANVITKWKHCPVEDIPAIEREELPMKPEDIDMNPEALTAWKRAAAAVYRKDKARKSRRISLEFMLEQANKFANHKAIWFPYNMDWRGRVYAVSMFNPQGNDMTKGLLTLAKGKPIGKEGYYWLKIHGANCAGVDKVPFPERIKFIEENHENIMACAKSPLENTWWAEQDSPFCFLAFCFEYAGVQHHGLSYNCSLPLAFDGSCSGIQHFSAMLRDEVGGRAVNLLPSETVQDIYGIVAKKVNEILQADAINGTDNEVVTVTDENTGEISEKVKLGTKALAGQWLAYGVTRSVTKRSVMTLAYGSKEFGFRQQVLEDTIQPAIDSGKGLMFTQPNQAAGYMAKLIWESVSVTVVAAVEAMNWLKSAAKLLAAEVKDKKTGEILRKRCAVHWVTPDGFPVWQEYKKPIQTRLNLMFLGQFRLQPTINTNKDSEIDAHKQESGIAPNFVHSQDGSHLRKTVVWAHEKYGIESFALIHDSFGTIPADAANLFKAVRETMVDTYESCDVLADFYDQFADQLHESQLDKMPALPAKGNLNLRDILESDFAFA

SEQ ID NO: 112 - protein, 883 aa, synthetic construct
MNTINIAKNDFSDIELAAIPFNTLADHYGERLAREQLALEHESYEMGEARFRKMFERQLKAGEVADNAAAKPLITTLLPKMIARINDWFEEVKAKRGKRPTAFQFLQEIKPEAVAYITIKTTLACLTSADNTTVQAVASAIGRAIEDEARFGRIRDLEAKHFKKNVEEQLNIRVGHVYKKAFMQVVEADMLSKGLLGGEAWSSWHKEDSIHVGVRCIEMLIESTGMVSLHRQNAGVVGQDSETIELAPEYAEAIATRAGALAGISPMFQPCVVPPKPWTGITGGGYWANGRRPLALVRTHSKKALMRYEDVYMPEVYKAINIAQNTAWKINKKVLAVANVITKWKHCPVEDIPAIEREELPMKPEDIDMNPEALTAWKRAAAAVYRKDKARKSRRISLEFMLEQANKFANHKAIWFPYNMDWRGRVYAVSMFNPQGNDMTKGLLTLAKGKPIGKEGYYWLKIHGANCAGVDKVPFPERIKFIEENHENIMACAKSPLENTWWAEQDSPFCFLAFCFEYAGVQHHGLSYNCSLPLAFDGSCSGIQHFSAMLRDEVGGRAVNLLPSETVQDIYGIVAKKVNEILQADAINGTDNEVVTVTDENTGEISEKVKLGTKALAGQWLAYGVTRSVTKRSVMTLAYGSKEFGFRQQVLEDTIQPAIDSGKGLMFTQPNQAAGYMAKLIWESVSVTVVAAVEAMNWLKSAAKLLAAEVKDKKTGEILRKRCAVHWVTPDGFPVWQEYKKPIQTRLNLMFLGQFRLQPTINTNKDSEIDAHKQESGIAPNFVHSQDGSHLRKTVVWAHEKYGIESFALIHDSFGTIPADAANLFKAVRETMVDTYESCDVLADFYDQFADQLHESQLDKMPALPAKGNLNLRDILESDFAFA

SEQ ID NO: 113 - protein, 883 aa, synthetic construct
MNTINIAKNDFSDIELAAIPFNTLADHYGERLAREQLALEHESYEMGEARFRKMFERQLKAGEVADNAAAKPLITTLLPKMIARINDWFEEVKAKRGKRPTAFQFLQEIKPEAVAYITIKTTLACLTSADNTTVQAVASAIGRAIEDEARFGRIRDLEAKHFKKNVEEQLNMRVGHVYKKAFMQVVEADMLSKGLLGGEAWSSWHKEDSIHVGVRCIEMLIESTGMVSLHRQNAGVVGQDSETIELAPEYAEAIATRAGALAGISPMFQPCVVPPKPWTGITGGGYWANGRRPLALVRTHSKKALMRYEDVYMPEVYKAINIAQNTAWKINKKVLAVANVITKWKHCPVEDIPAIEREELPMKPEDIDMNPEALTAWKRAAAAVYRKDKARKSRRISLEFMLEQANKFANHKAIWFPYNMDWRGRVYAVSMFNPQGNDMTKGLLTLAKGKPIGKEGYYWLKIHGANCAGVDKVPFPERIKFIEENHENIMACAKSPLENTWWAEQDSPFCFLAFCFEYAGVQHHGLSYNCSLPLAFDGSCSGIQHFSAMLRDEVGGRAVNLLPSETVQDIYGIVAKKVNEILQADAINGTDNEVVTVTDENTGEISEKVKLGTKALAGQWLAYGVTRSVTKRSVMTLAYGSKEFGFRQQVLEDTIQPAIDSGKGLMFTQPNQAAGYMAKLIWESVSVTVVAAVEAMNWLKSAAKLLAAEVKDKKTGEILRKRCAVHWVTPDGFPVWQEYKKPIQTRLNLMFLGQFRLQPTINTNKDSEIDAHKQESGIAPNFVHSQDGSHLRKTVVWAHEKYGIESFALIHDSFGTIPADAANLFKAVRETMVDTYESCDVLADFYDQFADQLHESQLDKMPALPAKGNLNLRDILESDFAFA

SEQ ID NO: 114 - protein, 883 aa, synthetic construct
MNTINIAKNDFSDIELAAIPFNTLADHYGERLAREQLALEHESYEMGEARFRKMFERQLKAGEVADNAAAKPLITTLLPKMIARINDWFEEVKAKRGKRPTAFQFLQEIKPEAVAYITIKTTLACLTSADNTTVQAVASAIGRAIEDEARFGRIRDLEAKHFKKNVEEQLNVRVGHVYKKAFMQVVEADMLSKGLLGGEAWSSWHKEDSIHVGVRCIEMLIESTGMVSLHRQNAGVVGQDSETIELAPEYAEAIATRAGALAGISPMFQPCVVPPKPWTGITGGGYWANGRRPLALVRTHSKKALMRYEDVYMPEVYKAINIAQNTAWKINKKVLAVANVITKWKHCPVEDIPAIEREELPMKPEDIDMNPEALTAWKRAAAAVYRKDKARKSRRISLEFMLEQANKFANHKAIWFPYNMDWRGRVYAVSMFNPQGNDMTKGLLTLAKGKPIGKEGYYWLKIHGANCAGVDKVPFPERIKFIEENHENIMACAKSPLENTWWAEQDSPFCFLAFCFEYAGVQHHGLSYNCSLPLAFDGSCSGIQHFSAMLRDEVGGRAVNLLPSETVQDIYGIVAKKVNEILQADAINGTDNEVVTVTDENTGEISEKVKLGTKALAGQWLAYGVTRSVTKRSVMTLAYGSKEFGFRQQVLEDTIQPAIDSGKGLMFTQPNQAAGYMAKLIWESVSVTVVAAVEAMNWLKSAAKLLAAEVKDKKTGEILRKRCAVHWVTPDGFPVWQEYKKPIQTRLNLMFLGQFRLQPTINTNKDSEIDAHKQESGIAPNFVHSQDGSHLRKTVVWAHEKYGIESFALIHDSFGTIPADAANLFKAVRETMVDTYESCDVLADFYDQFADQLHESQLDKMPALPAKGNLNLRDILESDFAFA

SEQ ID NO: 115 - protein, 883 aa, synthetic construct
MNTINIAKNDFSDIELAAIPFNTLADHYGERLAREQLALEHESYEMGEARFRKMFERQLKAGEVADNAAAKPLITTLLPKMIARINDWFEEVKAKRGKRPTAFQFLQEIKPEAVAYITIKTTLACLTSADNTTVQAVASAIGRAIEDEARFGRIRDLEAKHFKKNVEEQLNPRVGHVYKKAFMQVVEADMLSKGLLGGEAWSSWHKEDSIHVGVRCIEMLIESTGMVSLHRQNAGVVGQDSETIELAPEYAEAIATRAGALAGISPMFQPCVVPPKPWTGITGGGYWANGRRPLALVRTHSKKALMRYEDVYMPEVYKAINIAQNTAWKINKKVLAVANVITKWKHCPVEDIPAIEREELPMKPEDIDMNPEALTAWKRAAAAVYRKDKARKSRRISLEFMLEQANKFANHKAIWFPYNMDWRGRVYAVSMFNPQGNDMTKGLLTLAKGKPIGKEGYYWLKIHGANCAGVDKVPFPERIKFIEENHENIMACAKSPLENTWWAEQDSPFCFLAFCFEYAGVQHHGLSYNCSLPLAFDGSCSGIQHFSAMLRDEVGGRAVNLLPSETVQDIYGIVAKKVNEILQADAINGTDNEVVTVTDENTGEISEKVKLGTKALAGQWLAYGVTRSVTKRSVMTLAYGSKEFGFRQQVLEDTIQPAIDSGKGLMFTQPNQAAGYMAKLIWESVSVTVVAAVEAMNWLKSAAKLLAAEVKDKKTGEILRKRCAVHWVTPDGFPVWQEYKKPIQTRLNLMFLGQFRLQPTINTNKDSEIDAHKQESGIAPNFVHSQDGSHLRKTVVWAHEKYGIESFALIHDSFGTIPADAANLFKAVRETMVDTYESCDVLADFYDQFADQLHESQLDKMPALPAKGNLNLRDILESDFAFA

SEQ ID NO: 116 - protein, 883 aa, synthetic construct
MNTINIAKNDFSDIELAAIPFNTLADHYGERLAREQLALEHESYEMGEARFRKMFERQLKAGEVADNAAAKPLITTLLPKMIARINDWFEEVKAKRGKRPTAFQFLQEIKPEAVAYITIKTTLACLTSADNTTVQAVASAIGRAIEDEARFGRIRDLEAKHFKKNVEEQLNTRVGHVYKKAFMQVVEADMLSKGLLGGEAWSSWHKEDSIHVGVRCIEMLIESTGMVSLHRQNAGVVGQDSETIELAPEYAEAIATRAGALAGISPMFQPCVVPPKPWTGITGGGYWANGRRPLALVRTHSKKALMRYEDVYMPEVYKAINIAQNTAWKINKKVLAVANVITKWKHCPVEDIPAIEREELPMKPEDIDMNPEALTAWKRAAAAVYRKDKARKSRRISLEFMLEQANKFANHKAIWFPYNMDWRGRVYAVSMFNPQGNDMTKGLLTLAKGKPIGKEGYYWLKIHGANCAGVDKVPFPERIKFIEENHENIMACAKSPLENTWWAEQDSPFCFLAFCFEYAGVQHHGLSYNCSLPLAFDGSCSGIQHFSAMLRDEVGGRAVNLLPSETVQDIYGIVAKKVNEILQADAINGTDNEVVTVTDENTGEISEKVKLGTKALAGQWLAYGVTRSVTKRSVMTLAYGSKEFGFRQQVLEDTIQPAIDSGKGLMFTQPNQAAGYMAKLIWESVSVTVVAAVEAMNWLKSAAKLLAAEVKDKKTGEILRKRCAVHWVTPDGFPVWQEYKKPIQTRLNLMFLGQFRLQPTINTNKDSEIDAHKQESGIAPNFVHSQDGSHLRKTVVWAHEKYGIESFALIHDSFGTIPADAANLFKAVRETMVDTYESCDVLADFYDQFADQLHESQLDKMPALPAKGNLNLRDILESDFAFA

SEQ ID NO: 117 - protein, 883 aa, synthetic construct
MNTINIAKNDFSDIELAAIPFNTLADHYGERLAREQLALEHESYEMGEARFRKMFERQLKAGEVADNAAAKPLITTLLPKMIARINDWFEEVKAKRGKRPTAFQFLQEIKPEAVAYITIKTTLACLTSADNTTVQAVASAIGRAIEDEARFGRIRDLEAKHFKKNVEEQLNCRVGHVYKKAFMQVVEADMLSKGLLGGEAWSSWHKEDSIHVGVRCIEMLIESTGMVSLHRQNAGVVGQDSETIELAPEYAEAIATRAGALAGISPMFQPCVVPPKPWTGITGGGYWANGRRPLALVRTHSKKALMRYEDVYMPEVYKAINIAQNTAWKINKKVLAVANVITKWKHCPVEDIPAIEREELPMKPEDIDMNPEALTAWKRAAAAVYRKDKARKSRRISLEFMLEQANKFANHKAIWFPYNMDWRGRVYAVSMFNPQGNDMTKGLLTLAKGKPIGKEGYYWLKIHGANCAGVDKVPFPERIKFIEENHENIMACAKSPLENTWWAEQDSPFCFLAFCFEYAGVQHHGLSYNCSLPLAFDGSCSGIQHFSAMLRDEVGGRAVNLLPSETVQDIYGIVAKKVNEILQADAINGTDNEVVTVTDENTGEISEKVKLGTKALAGQWLAYGVTRSVTKRSVMTLAYGSKEFGFRQQVLEDTIQPAIDSGKGLMFTQPNQAAGYMAKLIWESVSVTVVAAVEAMNWLKSAAKLLAAEVKDKKTGEILRKRCAVHWVTPDGFPVWQEYKKPIQTRLNLMFLGQFRLQPTINTNKDSEIDAHKQESGIAPNFVHSQDGSHLRKTVVWAHEKYGIESFALIHDSFGTIPADAANLFKAVRETMVDTYESCDVLADFYDQFADQLHESQLDKMPALPAKGNLNLRDILESDFAFA

SEQ ID NO: 118 - protein, 883 aa, synthetic construct
MNTINIAKNDFSDIELAAIPFNTLADHYGERLAREQLALEHESYEMGEARFRKMFERQLKAGEVADNAAAKPLITTLLPKMIARINDWFEEVKAKRGKRPTAFQFLQEIKPEAVAYITIKTTLACLTSADNTTVQAVASAIGRAIEDEARFGRIRDLEAKHFKKNVEEQLNNRVGHVYKKAFMQVVEADMLSKGLLGGEAWSSWHKEDSIHVGVRCIEMLIESTGMVSLHRQNAGVVGQDSETIELAPEYAEAIATRAGALAGISPMFQPCVVPPKPWTGITGGGYWANGRRPLALVRTHSKKALMRYEDVYMPEVYKAINIAQNTAWKINKKVLAVANVITKWKHCPVEDIPAIEREELPMKPEDIDMNPEALTAWKRAAAAVYRKDKARKSRRISLEFMLEQANKFANHKAIWFPYNMDWRGRVYAVSMFNPQGNDMTKGLLTLAKGKPIGKEGYYWLKIHGANCAGVDKVPFPERIKFIEENHENIMACAKSPLENTWWAEQDSPFCFLAFCFEYAGVQHHGLSYNCSLPLAFDGSCSGIQHFSAMLRDEVGGRAVNLLPSETVQDIYGIVAKKVNEILQADAINGTDNEVVTVTDENTGEISEKVKLGTKALAGQWLAYGVTRSVTKRSVMTLAYGSKEFGFRQQVLEDTIQPAIDSGKGLMFTQPNQAAGYMAKLIWESVSVTVVAAVEAMNWLKSAAKLLAAEVKDKKTGEILRKRCAVHWVTPDGFPVWQEYKKPIQTRLNLMFLGQFRLQPTINTNKDSEIDAHKQESGIAPNFVHSQDGSHLRKTVVWAHEKYGIESFALIHDSFGTIPADAANLFKAVRETMVDTYESCDVLADFYDQFADQLHESQLDKMPALPAKGNLNLRDILESDFAFA

SEQ ID NO: 119 - protein, 883 aa, synthetic construct
MNTINIAKNDFSDIELAAIPFNTLADHYGERLAREQLALEHESYEMGEARFRKMFERQLKAGEVADNAAAKPLITTLLPKMIARINDWFEEVKAKRGKRPTAFQFLQEIKPEAVAYITIKTTLACLTSADNTTVQAVASAIGRAIEDEARFGRIRDLEAKHFKKNVEEQLNLRVGHVYKKAFMQVVEADMLSKGLLGGEAWSSWHKEDSIHVGVRCIEMLIESTGMVSLHRQNAGVVGQDSETIELAPEYAEAIATRAGALAGISPMFQPCVVPPKPWTGITGGGYWANGRRPLALVRTHSKKALMRYEDVYMPEVYKAINIAQNTAWKINKKVLAVANVITKWKHCPVEDIPAIEREELPMKPEDIDMNPEALTAWKRAAAAVYRKDKARKSRRISLEFMLEQANKFANHKAIWFPYNMDWRGRVYAVSMFNPQGNDMTKGLLTLAKGKPIGKEGYYWLKIHGANCAGVDKVPFPERIKFIEENHENIMACAKSPLENTWWAEQDSPFCFLAFCFEYAGVQHHGLSYNCSLPLAFDGSCSGIQHFSAMLRDEVGGRAVNLLPSETVQDIYGIVAKKVNEILQADAINGTDNEVVTVTDENTGEISEKVKLGTKALAGQWLAYGVTRSVTKRSVMTLAYGSKEFGFRQQVLEDTIQPAIDSGKGLMFTQPNQAAGYMAKLIWESVSVTVVAAVEAMNWLKSAAKLLAAEVKDKKTGEILRKRCAVHWVTPDGFPVWQEYKKPIQTRLNLMFLGQFRLQPTINTNKDSEIDAHKQESGIAPNFVHSQDGSHLRKTVVWAHEKYGIESFALIHDSFGTIPADAANLFKAVRETMVDTYESCDVLADFYDQFADQLHESQLDKMPALPAKGNLNLRDILESDFAFA

SEQ ID NO: 120 - protein, 883 aa, synthetic construct
MNTINIAKNDFSDIELAAIPFNTLADHYGERLAREQLALEHESYEMGEARFRKMFERQLKAGEVADNAAAKPLITTLLPKMIARINDWFEEVKAKRGKRPTAFQFLQEIKPEAVAYITIKTTLACLTSADNTTVQAVASAIGRAIEDEARFGRIRDLEAKHFKKNVEEQLNKHVGHVYKKAFMQVVEADMLSKGLLGGEAWSSWHKEDSIHVGVRCIEMLIESTGMVSLHRQNAGVVGQDSETIELAPEYAEAIATRAGALAGISPMFQPCVVPPKPWTGITGGGYWANGRRPLALVRTHSKKALMRYEDVYMPEVYKAINIAQNTAWKINKKVLAVANVITKWKHCPVEDIPAIEREELPMKPEDIDMNPEALTAWKRAAAAVYRKDKARKSRRISLEFMLEQANKFANHKAIWFPYNMDWRGRVYAVSMFNPQGNDMTKGLLTLAKGKPIGKEGYYWLKIHGANCAGVDKVPFPERIKFIEENHENIMACAKSPLENTWWAEQDSPFCFLAFCFEYAGVQHHGLSYNCSLPLAFDGSCSGIQHFSAMLRDEVGGRAVNLLPSETVQDIYGIVAKKVNEILQADAINGTDNEVVTVTDENTGEISEKVKLGTKALAGQWLAYGVTRSVTKRSVMTLAYGSKEFGFRQQVLEDTIQPAIDSGKGLMFTQPNQAAGYMAKLIWESVSVTVVAAVEAMNWLKSAAKLLAAEVKDKKTGEILRKRCAVHWVTPDGFPVWQEYKKPIQTRLNLMFLGQFRLQPTINTNKDSEIDAHKQESGIAPNFVHSQDGSHLRKTVVWAHEKYGIESFALIHDSFGTIPADAANLFKAVRETMVDTYESCDVLADFYDQFADQLHESQLDKMPALPAKGNLNLRDILESDFAFA

SEQ ID NO: 121 - protein, 883 aa, synthetic construct
MNTINIAKNDFSDIELAAIPFNTLADHYGERLAREQLALEHESYEMGEARFRKMFERQLKAGEVADNAAAKPLITTLLPKMIARINDWFEEVKAKRGKRPTAFQFLQEIKPEAVAYITIKTTLACLTSADNTTVQAVASAIGRAIEDEARFGRIRDLEAKHFKKNVEEQLNKYVGHVYKKAFMQVVEADMLSKGLLGGEAWSSWHKEDSIHVGVRCIEMLIESTGMVSLHRQNAGVVGQDSETIELAPEYAEAIATRAGALAGISPMFQPCVVPPKPWTGITGGGYWANGRRPLALVRTHSKKALMRYEDVYMPEVYKAINIAQNTAWKINKKVLAVANVITKWKHCPVEDIPAIEREELPMKPEDIDMNPEALTAWKRAAAAVYRKDKARKSRRISLEFMLEQANKFANHKAIWFPYNMDWRGRVYAVSMFNPQGNDMTKGLLTLAKGKPIGKEGYYWLKIHGANCAGVDKVPFPERIKFIEENHENIMACAKSPLENTWWAEQDSPFCFLAFCFEYAGVQHHGLSYNCSLPLAFDGSCSGIQHFSAMLRDEVGGRAVNLLPSETVQDIYGIVAKKVNEILQADAINGTDNEVVTVTDENTGEISEKVKLGTKALAGQWLAYGVTRSVTKRSVMTLAYGSKEFGFRQQVLEDTIQPAIDSGKGLMFTQPNQAAGYMAKLIWESVSVTVVAAVEAMNWLKSAAKLLAAEVKDKKTGEILRKRCAVHWVTPDGFPVWQEYKKPIQTRLNLMFLGQFRLQPTINTNKDSEIDAHKQESGIAPNFVHSQDGSHLRKTVVWAHEKYGIESFALIHDSFGTIPADAANLFKAVRETMVDTYESCDVLADFYDQFADQLHESQLDKMPALPAKGNLNLRDILESDFAFA

SEQ ID NO: 122 - protein, 883 aa, synthetic construct
MNTINIAKNDFSDIELAAIPFNTLADHYGERLAREQLALEHESYEMGEARFRKMFERQLKAGEVADNAAAKPLITTLLPKMIARINDWFEEVKAKRGKRPTAFQFLQEIKPEAVAYITIKTTLACLTSADNTTVQAVASAIGRAIEDEARFGRIRDLEAKHFKKNVEEQLNKSVGHVYKKAFMQVVEADMLSKGLLGGEAWSSWHKEDSIHVGVRCIEMLIESTGMVSLHRQNAGVVGQDSETIELAPEYAEAIATRAGALAGISPMFQPCVVPPKPWTGITGGGYWANGRRPLALVRTHSKKALMRYEDVYMPEVYKAINIAQNTAWKINKKVLAVANVITKWKHCPVEDIPAIEREELPMKPEDIDMNPEALTAWKRAAAAVYRKDKARKSRRISLEFMLEQANKFANHKAIWFPYNMDWRGRVYAVSMFNPQGNDMTKGLLTLAKGKPIGKEGYYWLKIHGANCAGVDKVPFPERIKFIEENHENIMACAKSPLENTWWAEQDSPFCFLAFCFEYAGVQHHGLSYNCSLPLAFDGSCSGIQHFSAMLRDEVGGRAVNLLPSETVQDIYGIVAKKVNEILQADAINGTDNEVVTVTDENTGEISEKVKLGTKALAGQWLAYGVTRSVTKRSVMTLAYGSKEFGFRQQVLEDTIQPAIDSGKGLMFTQPNQAAGYMAKLIWESVSVTVVAAVEAMNWLKSAAKLLAAEVKDKKTGEILRKRCAVHWVTPDGFPVWQEYKKPIQTRLNLMFLGQFRLQPTINTNKDSEIDAHKQESGIAPNFVHSQDGSHLRKTVVWAHEKYGIESFALIHDSFGTIPADAANLFKAVRETMVDTYESCDVLADFYDQFADQLHESQLDKMPALPAKGNLNLRDILESDFAFA

SEQ ID NO: 123 - protein, 883 aa, synthetic construct
MNTINIAKNDFSDIELAAIPFNTLADHYGERLAREQLALEHESYEMGEARFRKMFERQLKAGEVADNAAAKPLITTLLPKMIARINDWFEEVKAKRGKRPTAFQFLQEIKPEAVAYITIKTTLACLTSADNTTVQAVASAIGRAIEDEARFGRIRDLEAKHFKKNVEEQLNKWVGHVYKKAFMQVVEADMLSKGLLGGEAWSSWHKEDSIHVGVRCIEMLIESTGMVSLHRQNAGVVGQDSETIELAPEYAEAIATRAGALAGISPMFQPCVVPPKPWTGITGGGYWANGRRPLALVRTHSKKALMRYEDVYMPEVYKAINIAQNTAWKINKKVLAVANVITKWKHCPVEDIPAIEREELPMKPEDIDMNPEALTAWKRAAAAVYRKDKARKSRRISLEFMLEQANKFANHKAIWFPYNMDWRGRVYAVSMFNPQGNDMTKGLLTLAKGKPIGKEGYYWLKIHGANCAGVDKVPFPERIKFIEENHENIMACAKSPLENTWWAEQDSPFCFLAFCFEYAGVQHHGLSYNCSLPLAFDGSCSGIQHFSAMLRDEVGGRAVNLLPSETVQDIYGIVAKKVNEILQADAINGTDNEVVTVTDENTGEISEKVKLGTKALAGQWLAYGVTRSVTKRSVMTLAYGSKEFGFRQQVLEDTIQPAIDSGKGLMFTQPNQAAGYMAKLIWESVSVTVVAAVEAMNWLKSAAKLLAAEVKDKKTGEILRKRCAVHWVTPDGFPVWQEYKKPIQTRLNLMFLGQFRLQPTINTNKDSEIDAHKQESGIAPNFVHSQDGSHLRKTVVWAHEKYGIESFALIHDSFGTIPADAANLFKAVRETMVDTYESCDVLADFYDQFADQLHESQLDKMPALPAKGNLNLRDILESDFAFA

SEQ ID NO: 124 - protein, 883 aa, synthetic construct
MNTINIAKNDFSDIELAAIPFNTLADHYGERLAREQLALEHESYEMGEARFRKMFERQLKAGEVADNAAAKPLITTLLPKMIARINDWFEEVKAKRGKRPTAFQFLQEIKPEAVAYITIKTTLACLTSADNTTVQAVASAIGRAIEDEARFGRIRDLEAKHFKKNVEEQLNKPVGHVYKKAFMQVVEADMLSKGLLGGEAWSSWHKEDSIHVGVRCIEMLIESTGMVSLHRQNAGVVGQDSETIELAPEYAEAIATRAGALAGISPMFQPCVVPPKPWTGITGGGYWANGRRPLALVRTHSKKALMRYEDVYMPEVYKAINIAQNTAWKINKKVLAVANVITKWKHCPVEDIPAIEREELPMKPEDIDMNPEALTAWKRAAAAVYRKDKARKSRRISLEFMLEQANKFANHKAIWFPYNMDWRGRVYAVSMFNPQGNDMTKGLLTLAKGKPIGKEGYYWLKIHGANCAGVDKVPFPERIKFIEENHENIMACAKSPLENTWWAEQDSPFCFLAFCFEYAGVQHHGLSYNCSLPLAFDGSCSGIQHFSAMLRDEVGGRAVNLLPSETVQDIYGIVAKKVNEILQADAINGTDNEVVTVTDENTGEISEKVKLGTKALAGQWLAYGVTRSVTKRSVMTLAYGSKEFGFRQQVLEDTIQPAIDSGKGLMFTQPNQAAGYMAKLIWESVSVTVVAAVEAMNWLKSAAKLLAAEVKDKKTGEILRKRCAVHWVTPDGFPVWQEYKKPIQTRLNLMFLGQFRLQPTINTNKDSEIDAHKQESGIAPNFVHSQDGSHLRKTVVWAHEKYGIESFALIHDSFGTIPADAANLFKAVRETMVDTYESCDVLADFYDQFADQLHESQLDKMPALPAKGNLNLRDILESDFAFA

SEQ ID NO: 125 - protein, 883 aa, synthetic construct
MNTINIAKNDFSDIELAAIPFNTLADHYGERLAREQLALEHESYEMGEARFRKMFERQLKAGEVADNAAAKPLITTLLPKMIARINDWFEEVKAKRGKRPTAFQFLQEIKPEAVAYITIKTTLACLTSADNTTVQAVASAIGRAIEDEARFGRIRDLEAKHFKKNVEEQLNKNVGHVYKKAFMQVVEADMLSKGLLGGEAWSSWHKEDSIHVGVRCIEMLIESTGMVSLHRQNAGVVGQDSETIELAPEYAEAIATRAGALAGISPMFQPCVVPPKPWTGITGGGYWANGRRPLALVRTHSKKALMRYEDVYMPEVYKAINIAQNTAWKINKKVLAVANVITKWKHCPVEDIPAIEREELPMKPEDIDMNPEALTAWKRAAAAVYRKDKARKSRRISLEFMLEQANKFANHKAIWFPYNMDWRGRVYAVSMFNPQGNDMTKGLLTLAKGKPIGKEGYYWLKIHGANCAGVDKVPFPERIKFIEENHENIMACAKSPLENTWWAEQDSPFCFLAFCFEYAGVQHHGLSYNCSLPLAFDGSCSGIQHFSAMLRDEVGGRAVNLLPSETVQDIYGIVAKKVNEILQADAINGTDNEVVTVTDENTGEISEKVKLGTKALAGQWLAYGVTRSVTKRSVMTLAYGSKEFGFRQQVLEDTIQPAIDSGKGLMFTQPNQAAGYMAKLIWESVSVTVVAAVEAMNWLKSAAKLLAAEVKDKKTGEILRKRCAVHWVTPDGFPVWQEYKKPIQTRLNLMFLGQFRLQPTINTNKDSEIDAHKQESGIAPNFVHSQDGSHLRKTVVWAHEKYGIESFALIHDSFGTIPADAANLFKAVRETMVDTYESCDVLADFYDQFADQLHESQLDKMPALPAKGNLNLRDILESDFAFA

SEQ ID NO: 126 - protein, 883 aa, synthetic construct
MNTINIAKNDFSDIELAAIPFNTLADHYGERLAREQLALEHESYEMGEARFRKMFERQLKAGEVADNAAAKPLITTLLPKMIARINDWFEEVKAKRGKRPTAFQFLQEIKPEAVAYITIKTTLACLTSADNTTVQAVASAIGRAIEDEARFGRIRDLEAKHFKKNVEEQLNKQVGHVYKKAFMQVVEADMLSKGLLGGEAWSSWHKEDSIHVGVRCIEMLIESTGMVSLHRQNAGVVGQDSETIELAPEYAEAIATRAGALAGISPMFQPCVVPPKPWTGITGGGYWANGRRPLALVRTHSKKALMRYEDVYMPEVYKAINIAQNTAWKINKKVLAVANVITKWKHCPVEDIPAIEREELPMKPEDIDMNPEALTAWKRAAAAVYRKDKARKSRRISLEFMLEQANKFANHKAIWFPYNMDWRGRVYAVSMFNPQGNDMTKGLLTLAKGKPIGKEGYYWLKIHGANCAGVDKVPFPERIKFIEENHENIMACAKSPLENTWWAEQDSPFCFLAFCFEYAGVQHHGLSYNCSLPLAFDGSCSGIQHFSAMLRDEVGGRAVNLLPSETVQDIYGIVAKKVNEILQADAINGTDNEVVTVTDENTGEISEKVKLGTKALAGQWLAYGVTRSVTKRSVMTLAYGSKEFGFRQQVLEDTIQPAIDSGKGLMFTQPNQAAGYMAKLIWESVSVTVVAAVEAMNWLKSAAKLLAAEVKDKKTGEILRKRCAVHWVTPDGFPVWQEYKKPIQTRLNLMFLGQFRLQPTINTNKDSEIDAHKQESGIAPNFVHSQDGSHLRKTVVWAHEKYGIESFALIHDSFGTIPADAANLFKAVRETMVDTYESCDVLADFYDQFADQLHESQLDKMPALPAKGNLNLRDILESDFAFA

SEQ ID NO: 127 - protein, 883 aa, synthetic construct
MNTINIAKNDFSDIELAAIPFNTLADHYGERLAREQLALEHESYEMGEARFRKMFERQLKAGEVADNAAAKPLITTLLPKMIARINDWFEEVKAKRGKRPTAFQFLQEIKPEAVAYITIKTTLACLTSADNTTVQAVASAIGRAIEDEARFGRIRDLEAKHFKKNVEEQLNAAVGHVYKKAFMQVVEADMLSKGLLGGEAWSSWHKEDSIHVGVRCIEMLIESTGMVSLHRQNAGVVGQDSETIELAPEYAEAIATRAGALAGISPMFQPCVVPPKPWTGITGGGYWANGRRPLALVRTHSKKALMRYEDVYMPEVYKAINIAQNTAWKINKKVLAVANVITKWKHCPVEDIPAIEREELPMKPEDIDMNPEALTAWKRAAAAVYRYDKARKSRRISLEFMLEQANKFANHKAIWFPYNMDWRGRVYAVSMFNPQGNDMTKGLLTLAKGKPIGKEGYYWLKIHGANCAGVDKVPFPERIKFIEENHENIMACAKSPLENTWWAEQDSPFCFLAFCFEYAGVQHHGLSYNCSLPLAFDGSCSGIQHFSAMLRDEVGGRAVNLLPSETVQDIYGIVAKKVNEILQADAINGTDNEVVTVTDENTGEISEKVKLGTKALAGQWLAYGVTRSVTKRSVMTLAYGSKEFGFRQQVLEDTIQPAIDSGKGLMFTQPNQAAGYMAKLIWESVSVTVVAAVEAMNWLKSAAKLLAAEVKDKKTGEILRKRCAVHWVTPDGFPVWQEYKKPIQTRLNLMFLGQFRLQPTINTNKDSEIDAHKQESGIAPNFVHSQDGSHLRKTVVWAHEKYGIESFALIHDSFGTIPADAANLFKAVRETMVDTYESCDVLADFYDQFADQLHESQLDKMPALPAKGNLNLRDILESDFAFA

SEQ ID NO: 128 - protein, 883 aa, synthetic construct
MNTINIAKNDFSDIELAAIPFNTLADHYGERLAREQLALEHESYEMGEARFRKMFERQLKAGEVADNAAAKPLITTLLPKMIARINDWFEEVKAKRGKRPTAFQFLQEIKPEAVAYITIKTTLACLTSADNTTVQAVASAIGRAIEDEARFGRIRDLEAKHFKKNVEEQLNAGVGHVYKKAFMQVVEADMLSKGLLGGEAWSSWHKEDSIHVGVRCIEMLIESTGMVSLHRQNAGVVGQDSETIELAPEYAEAIATRAGALAGISPMFQPCVVPPKPWTGITGGGYWANGRRPLALVRTHSKKALMRYEDVYMPEVYKAINIAQNTAWKINKKVLAVANVITKWKHCPVEDIPAIEREELPMKPEDIDMNPEALTAWKRAAAAVYRYDKARKSRRISLEFMLEQANKFANHKAIWFPYNMDWRGRVYAVSMFNPQGNDMTKGLLTLAKGKPIGKEGYYWLKIHGANCAGVDKVPFPERIKFIEENHENIMACAKSPLENTWWAEQDSPFCFLAFCFEYAGVQHHGLSYNCSLPLAFDGSCSGIQHFSAMLRDEVGGRAVNLLPSETVQDIYGIVAKKVNEILQADAINGTDNEVVTVTDENTGEISEKVKLGTKALAGQWLAYGVTRSVTKRSVMTLAYGSKEFGFRQQVLEDTIQPAIDSGKGLMFTQPNQAAGYMAKLIWESVSVTVVAAVEAMNWLKSAAKLLAAEVKDKKTGEILRKRCAVHWVTPDGFPVWQEYKKPIQTRLNLMFLGQFRLQPTINTNKDSEIDAHKQESGIAPNFVHSQDGSHLRKTVVWAHEKYGIESFALIHDSFGTIPADAANLFKAVRETMVDTYESCDVLADFYDQFADQLHESQLDKMPALPAKGNLNLRDILESDFAFA

SEQ ID NO: 129 - protein, 882 aa, synthetic construct
MNTINIAKNDFSDIELAAIPFNTLADHYGERLAREQLALEHESYEMGEARFRKMFERQLKAGEVADNAAAKPLITTLLPKMIARINDWFEEVKAKRGKRPTAFQFLQEIKPEAVAYITIKTTLACLTSADNTTVQAVASAIGRAIEDEARFGRIRDLEAKHFKKNVEEQLNAVGHVYKKAFMQVVEADMLSKGLLGGEAWSSWHKEDSIHVGVRCIEMLIESTGMVSLHRQNAGVVGQDSETIELAPEYAEAIATRAGALAGISPMFQPCVVPPKPWTGITGGGYWANGRRPLALVRTHSKKALMRYEDVYMPEVYKAINIAQNTAWKINKKVLAVANVITKWKHCPVEDIPAIEREELPMKPEDIDMNPEALTAWKRAAAAVYRYDKARKSRRISLEFMLEQANKFANHKAIWFPYNMDWRGRVYAVSMFNPQGNDMTKGLLTLAKGKPIGKEGYYWLKIHGANCAGVDKVPFPERIKFIEENHENIMACAKSPLENTWWAEQDSPFCFLAFCFEYAGVQHHGLSYNCSLPLAFDGSCSGIQHFSAMLRDEVGGRAVNLLPSETVQDIYGIVAKKVNEILQADAINGTDNEVVTVTDENTGEISEKVKLGTKALAGQWLAYGVTRSVTKRSVMTLAYGSKEFGFRQQVLEDTIQPAIDSGKGLMFTQPNQAAGYMAKLIWESVSVTVVAAVEAMNWLKSAAKLLAAEVKDKKTGEILRKRCAVHWVTPDGFPVWQEYKKPIQTRLNLMFLGQFRLQPTINTNKDSEIDAHKQESGIAPNFVHSQDGSHLRKTVVWAHEKYGIESFALIHDSFGTIPADAANLFKAVRETMVDTYESCDVLADFYDQFADQLHESQLDKMPALPAKGNLNLRDILESDFAFA

SEQ ID NO: 130 - protein, 883 aa, synthetic construct
MNTINIAKNDFSDIELAAIPFNTLADHYGERLAREQLALEHESYEMGEARFRKMFERQLKAGEVADNAAAKPLITTLLPKMIARINDWFEEVKAKRGKRPTAFQFLQEIKPEAVAYITIKTTLACLTSADNTTVQAVASAIGRAIEDEARFGRIRDLEAKHFKKNVEEQLNGAVGHVYKKAFMQVVEADMLSKGLLGGEAWSSWHKEDSIHVGVRCIEMLIESTGMVSLHRQNAGVVGQDSETIELAPEYAEAIATRAGALAGISPMFQPCVVPPKPWTGITGGGYWANGRRPLALVRTHSKKALMRYEDVYMPEVYKAINIAQNTAWKINKKVLAVANVITKWKHCPVEDIPAIEREELPMKPEDIDMNPEALTAWKRAAAAVYRYDKARKSRRISLEFMLEQANKFANHKAIWFPYNMDWRGRVYAVSMFNPQGNDMTKGLLTLAKGKPIGKEGYYWLKIHGANCAGVDKVPFPERIKFIEENHENIMACAKSPLENTWWAEQDSPFCFLAFCFEYAGVQHHGLSYNCSLPLAFDGSCSGIQHFSAMLRDEVGGRAVNLLPSETVQDIYGIVAKKVNEILQADAINGTDNEVVTVTDENTGEISEKVKLGTKALAGQWLAYGVTRSVTKRSVMTLAYGSKEFGFRQQVLEDTIQPAIDSGKGLMFTQPNQAAGYMAKLIWESVSVTVVAAVEAMNWLKSAAKLLAAEVKDKKTGEILRKRCAVHWVTPDGFPVWQEYKKPIQTRLNLMFLGQFRLQPTINTNKDSEIDAHKQESGIAPNFVHSQDGSHLRKTVVWAHEKYGIESFALIHDSFGTIPADAANLFKAVRETMVDTYESCDVLADFYDQFADQLHESQLDKMPALPAKGNLNLRDILESDFAFA

SEQ ID NO: 131 - protein, 883 aa, synthetic construct
MNTINIAKNDFSDIELAAIPFNTLADHYGERLAREQLALEHESYEMGEARFRKMFERQLKAGEVADNAAAKPLITTLLPKMIARINDWFEEVKAKRGKRPTAFQFLQEIKPEAVAYITIKTTLACLTSADNTTVQAVASAIGRAIEDEARFGRIRDLEAKHFKKNVEEQLNGGVGHVYKKAFMQVVEADMLSKGLLGGEAWSSWHKEDSIHVGVRCIEMLIESTGMVSLHRQNAGVVGQDSETIELAPEYAEAIATRAGALAGISPMFQPCVVPPKPWTGITGGGYWANGRRPLALVRTHSKKALMRYEDVYMPEVYKAINIAQNTAWKINKKVLAVANVITKWKHCPVEDIPAIEREELPMKPEDIDMNPEALTAWKRAAAAVYRYDKARKSRRISLEFMLEQANKFANHKAIWFPYNMDWRGRVYAVSMFNPQGNDMTKGLLTLAKGKPIGKEGYYWLKIHGANCAGVDKVPFPERIKFIEENHENIMACAKSPLENTWWAEQDSPFCFLAFCFEYAGVQHHGLSYNCSLPLAFDGSCSGIQHFSAMLRDEVGGRAVNLLPSETVQDIYGIVAKKVNEILQADAINGTDNEVVTVTDENTGEISEKVKLGTKALAGQWLAYGVTRSVTKRSVMTLAYGSKEFGFRQQVLEDTIQPAIDSGKGLMFTQPNQAAGYMAKLIWESVSVTVVAAVEAMNWLKSAAKLLAAEVKDKKTGEILRKRCAVHWVTPDGFPVWQEYKKPIQTRLNLMFLGQFRLQPTINTNKDSEIDAHKQESGIAPNFVHSQDGSHLRKTVVWAHEKYGIESFALIHDSFGTIPADAANLFKAVRETMVDTYESCDVLADFYDQFADQLHESQLDKMPALPAKGNLNLRDILESDFAFA

SEQ ID NO: 132 - protein, 882 aa, synthetic construct
MNTINIAKNDFSDIELAAIPFNTLADHYGERLAREQLALEHESYEMGEARFRKMFERQLKAGEVADNAAAKPLITTLLPKMIARINDWFEEVKAKRGKRPTAFQFLQEIKPEAVAYITIKTTLACLTSADNTTVQAVASAIGRAIEDEARFGRIRDLEAKHFKKNVEEQLNGVGHVYKKAFMQVVEADMLSKGLLGGEAWSSWHKEDSIHVGVRCIEMLIESTGMVSLHRQNAGVVGQDSETIELAPEYAEAIATRAGALAGISPMFQPCVVPPKPWTGITGGGYWANGRRPLALVRTHSKKALMRYEDVYMPEVYKAINIAQNTAWKINKKVLAVANVITKWKHCPVEDIPAIEREELPMKPEDIDMNPEALTAWKRAAAAVYRYDKARKSRRISLEFMLEQANKFANHKAIWFPYNMDWRGRVYAVSMFNPQGNDMTKGLLTLAKGKPIGKEGYYWLKIHGANCAGVDKVPFPERIKFIEENHENIMACAKSPLENTWWAEQDSPFCFLAFCFEYAGVQHHGLSYNCSLPLAFDGSCSGIQHFSAMLRDEVGGRAVNLLPSETVQDIYGIVAKKVNEILQADAINGTDNEVVTVTDENTGEISEKVKLGTKALAGQWLAYGVTRSVTKRSVMTLAYGSKEFGFRQQVLEDTIQPAIDSGKGLMFTQPNQAAGYMAKLIWESVSVTVVAAVEAMNWLKSAAKLLAAEVKDKKTGEILRKRCAVHWVTPDGFPVWQEYKKPIQTRLNLMFLGQFRLQPTINTNKDSEIDAHKQESGIAPNFVHSQDGSHLRKTVVWAHEKYGIESFALIHDSFGTIPADAANLFKAVRETMVDTYESCDVLADFYDQFADQLHESQLDKMPALPAKGNLNLRDILESDFAFA

SEQ ID NO: 133 - protein, 883 aa, synthetic construct
MNTINIAKNDFSDIELAAIPFNTLADHYGERLAREQLALEHESYEMGEARFRKMFERQLKAGEVADNAAAKPLITTLLPKMIARINDWFEEVKAKRGKRPTAFQFLQEIKPEAVAYITIKTTLACLTSADNTTVQAVASAIGRAIEDEARFGRIRDLEAKHFKKNVEEQLNAAVGHVYKKAFMQVVEADMLSKGLLGGEAWSSWHKEDSIHVGVRCIEMLIESTGMVSLHRQNAGVVGQDSETIELAPEYAEAIATRAGALAGISPMFQPCVVPPKPWTGITGGGYWANGRRPLALVRTHSKKALMRYEDVYMPEVYKAINIAQNTAWKINKKVLAVANVITKWKHCPVEDIPAIEREELPMKPEDIDMNPEALTAWKRAAAAVYRSDKARKSRRISLEFMLEQANKFANHKAIWFPYNMDWRGRVYAVSMFNPQGNDMTKGLLTLAKGKPIGKEGYYWLKIHGANCAGVDKVPFPERIKFIEENHENIMACAKSPLENTWWAEQDSPFCFLAFCFEYAGVQHHGLSYNCSLPLAFDGSCSGIQHFSAMLRDEVGGRAVNLLPSETVQDIYGIVAKKVNEILQADAINGTDNEVVTVTDENTGEISEKVKLGTKALAGQWLAYGVTRSVTKRSVMTLAYGSKEFGFRQQVLEDTIQPAIDSGKGLMFTQPNQAAGYMAKLIWESVSVTVVAAVEAMNWLKSAAKLLAAEVKDKKTGEILRKRCAVHWVTPDGFPVWQEYKKPIQTRLNLMFLGQFRLQPTINTNKDSEIDAHKQESGIAPNFVHSQDGSHLRKTVVWAHEKYGIESFALIHDSFGTIPADAANLFKAVRETMVDTYESCDVLADFYDQFADQLHESQLDKMPALPAKGNLNLRDILESDFAFA

SEQ ID NO: 134 - protein, 883 aa, synthetic construct
MNTINIAKNDFSDIELAAIPFNTLADHYGERLAREQLALEHESYEMGEARFRKMFERQLKAGEVADNAAAKPLITTLLPKMIARINDWFEEVKAKRGKRPTAFQFLQEIKPEAVAYITIKTTLACLTSADNTTVQAVASAIGRAIEDEARFGRIRDLEAKHFKKNVEEQLNAGVGHVYKKAFMQVVEADMLSKGLLGGEAWSSWHKEDSIHVGVRCIEMLIESTGMVSLHRQNAGVVGQDSETIELAPEYAEAIATRAGALAGISPMFQPCVVPPKPWTGITGGGYWANGRRPLALVRTHSKKALMRYEDVYMPEVYKAINIAQNTAWKINKKVLAVANVITKWKHCPVEDIPAIEREELPMKPEDIDMNPEALTAWKRAAAAVYRSDKARKSRRISLEFMLEQANKFANHKAIWFPYNMDWRGRVYAVSMFNPQGNDMTKGLLTLAKGKPIGKEGYYWLKIHGANCAGVDKVPFPERIKFIEENHENIMACAKSPLENTWWAEQDSPFCFLAFCFEYAGVQHHGLSYNCSLPLAFDGSCSGIQHFSAMLRDEVGGRAVNLLPSETVQDIYGIVAKKVNEILQADAINGTDNEVVTVTDENTGEISEKVKLGTKALAGQWLAYGVTRSVTKRSVMTLAYGSKEFGFRQQVLEDTIQPAIDSGKGLMFTQPNQAAGYMAKLIWESVSVTVVAAVEAMNWLKSAAKLLAAEVKDKKTGEILRKRCAVHWVTPDGFPVWQEYKKPIQTRLNLMFLGQFRLQPTINTNKDSEIDAHKQESGIAPNFVHSQDGSHLRKTVVWAHEKYGIESFALIHDSFGTIPADAANLFKAVRETMVDTYESCDVLADFYDQFADQLHESQLDKMPALPAKGNLNLRDILESDFAFA

SEQ ID NO: 135 - protein, 882 aa, synthetic construct; identical to SEQ ID NO: 86

SEQ ID NO: 136 - protein, 883 aa, synthetic construct
MNTINIAKNDFSDIELAAIPFNTLADHYGERLAREQLALEHESYEMGEARFRKMFERQLKAGEVADNAAAKPLITTLLPKMIARINDWFEEVKAKRGKRPTAFQFLQEIKPEAVAYITIKTTLACLTSADNTTVQAVASAIGRAIEDEARFGRIRDLEAKHFKKNVEEQLNGAVGHVYKKAFMQVVEADMLSKGLLGGEAWSSWHKEDSIHVGVRCIEMLIESTGMVSLHRQNAGVVGQDSETIELAPEYAEAIATRAGALAGISPMFQPCVVPPKPWTGITGGGYWANGRRPLALVRTHSKKALMRYEDVYMPEVYKAINIAQNTAWKINKKVLAVANVITKWKHCPVEDIPAIEREELPMKPEDIDMNPEALTAWKRAAAAVYRSDKARKSRRISLEFMLEQANKFANHKAIWFPYNMDWRGRVYAVSMFNPQGNDMTKGLLTLAKGKPIGKEGYYWLKIHGANCAGVDKVPFPERIKFIEENHENIMACAKSPLENTWWAEQDSPFCFLAFCFEYAGVQHHGLSYNCSLPLAFDGSCSGIQHFSAMLRDEVGGRAVNLLPSETVQDIYGIVAKKVNEILQADAINGTDNEVVTVTDENTGEISEKVKLGTKALAGQWLAYGVTRSVTKRSVMTLAYGSKEFGFRQQVLEDTIQPAIDSGKGLMFTQPNQAAGYMAKLIWESVSVTVVAAVEAMNWLKSAAKLLAAEVKDKKTGEILRKRCAVHWVTPDGFPVWQEYKKPIQTRLNLMFLGQFRLQPTINTNKDSEIDAHKQESGIAPNFVHSQDGSHLRKTVVWAHEKYGIESFALIHDSFGTIPADAANLFKAVRETMVDTYESCDVLADFYDQFADQLHESQLDKMPALPAKGNLNLRDILESDFAFA

SEQ ID NO: 137 - protein, 883 aa, synthetic construct
MNTINIAKNDFSDIELAAIPFNTLADHYGERLAREQLALEHESYEMGEARFRKMFERQLKAGEVADNAAAKPLITTLLPKMIARINDWFEEVKAKRGKRPTAFQFLQEIKPEAVAYITIKTTLACLTSADNTTVQAVASAIGRAIEDEARFGRIRDLEAKHFKKNVEEQLNGGVGHVYKKAFMQVVEADMLSKGLLGGEAWSSWHKEDSIHVGVRCIEMLIESTGMVSLHRQNAGVVGQDSETIELAPEYAEAIATRAGALAGISPMFQPCVVPPKPWTGITGGGYWANGRRPLALVRTHSKKALMRYEDVYMPEVYKAINIAQNTAWKINKKVLAVANVITKWKHCPVEDIPAIEREELPMKPEDIDMNPEALTAWKRAAAAVYRSDKARKSRRISLEFMLEQANKFANHKAIWFPYNMDWRGRVYAVSMFNPQGNDMTKGLLTLAKGKPIGKEGYYWLKIHGANCAGVDKVPFPERIKFIEENHENIMACAKSPLENTWWAEQDSPFCFLAFCFEYAGVQHHGLSYNCSLPLAFDGSCSGIQHFSAMLRDEVGGRAVNLLPSETVQDIYGIVAKKVNEILQADAINGTDNEVVTVTDENTGEISEKVKLGTKALAGQWLAYGVTRSVTKRSVMTLAYGSKEFGFRQQVLEDTIQPAIDSGKGLMFTQPNQAAGYMAKLIWESVSVTVVAAVEAMNWLKSAAKLLAAEVKDKKTGEILRKRCAVHWVTPDGFPVWQEYKKPIQTRLNLMFLGQFRLQPTINTNKDSEIDAHKQESGIAPNFVHSQDGSHLRKTVVWAHEKYGIESFALIHDSFGTIPADAANLFKAVRETMVDTYESCDVLADFYDQFADQLHESQLDKMPALPAKGNLNLRDILESDFAFA

SEQ ID NO: 138 - protein, 882 aa, synthetic construct; identical to SEQ ID NO: 87

SEQ ID NO: 139 - protein, 882 aa, synthetic construct
MNTINIAKNDFSDIELAAIPFNTLADHYGERLAREQLALEHESYEMGEARFRKMFERQLKAGEVADNAAAKPLITTLLPKMIARINDWFEEVKAKRGKRPTAFQFLQEIKPEAVAYITIKTTLACLTSAENTTVQAVASAIGRAIEDEARFGRIRDLEAKHFKKNVEEQLNRVGHVYKKAFMQVVEADMLSKGLLGGEAWSSWHKEDSIHVGVRCIEMLIESTGMVSLHRQNAGVVGQDSETIELAPEYAEAIATRAGALAGISPMFQPCVVPPKPWTGITGGGYWANGRRPLALVRTHSKKALMRYEDVYMPEVYKAINIAQNTAWKINKKVLAVANVITKWKHCPVEDIPAIEREELPMKPEDIDMNPEALTAWKRAAAAVYRYDKARKSRRISLEFMLEQANKFANHKAIWFPYNMDWRGRVYAVSMFNPQGNDMTKGLLTLAKGKPIGKEGYYWLKIHGANCAGVDKVPFPERIKFIEENHENIMACAKSPLENTWWAEQDSPFCFLAFCFEYAGVQHHGLSYNCSLPLAFDGSCSGIQHFSAMLRDEVGGRAVNLLPSETVQDIYGIVAKKVNEILQADAINGTDNEVVTVTDENTGEISEKVKLGTKALAGQWLAYGVTRSVTKRSVMTLAYGSKEFGFRQQVLEDTIQPAIDSGKGLMFTQPNQAAGYMAKLIWESVSVTVVAAVEAMNWLKSAAKLLAAEVKDKKTGEILRKRCAVHWVTPDGFPVWQEYKKPIQTRLNLMFLGQFRLQPTINTNKDSEIDAHKQESGIAPNFVHSQDGSHLRKTVVWAHEKYGIESFALIHDSFGTIPADAANLFKAVRETMVDTYESCDVLADFYDQFADQLHESQLDKMPALPAKGNLNLRDILESDFAFA

SEQ ID NO: 140 - protein, 882 aa, synthetic construct; identical to SEQ ID NO: 44

SEQ ID NO: 141 - protein, 883 aa, synthetic construct
MNTINIAKNDFSDIELAAIPFNTLADHYGERLAREQLALEHESYEMGEARFRKMFERQLKAGEVADNAAAKPLITTLLPKMIARINDWFEEVKAKRGKRPTAFQFLQEIKPEAVAYITIKTTLACLTSADNTTVQAVASAIGRAIEDEARFGRIRDLEAKHFKKNVEEQLNKRVGHVYKKAFMQVVEADMLSKGLLGGEAWSSWHKEDSIHVGVRCIEMLIESTGMVSLHRQNAGVVGQDSETIELAPEYAEAIATRAGALAGISPMFQPCVVPPKPWTGITGGGYWANGRRPLALVRTHSKKALMRYEDVYMPEVYKAINIAQNTAWKINKKVLAVANVITKWKHCPVEDIPAIEREELPMKPEDIDMNPEALTAWKRAAAAVYRADKARKSRRISLEFMLEQANKFANHKAIWFPYNMDWRGRVYAVSMFNPQGNDMTKGLLTLAKGKPIGKEGYYWLKIHGANCAGVDKVPFPERIKFIEENHENIMACAKSPLENTWWAEQDSPFCFLAFCFEYAGVQHHGLSYNCSLPLAFDGSCSGIQHFSAMLRDEVGGRAVNLLPSETVQDIYGIVAKKVNEILQADAINGTDNEVVTVTDENTGEISEKVKLGTKALAGQWLAYGVTRSVTKRSVMTLAYGSKEFGFRQQVLEDTIQPAIDSGKGLMFTQPNQAAGYMAKLIWESVSVTVVAAVEAMNWLKSAAKLLAAEVKDKKTGEILRKRCAVHWVTPDGFPVWQEYKKPIQTRLNLMFLGQFRLQPTINTNKDSEIDAHKQESGIAPNFVHSQDGSHLRKTVVWAHEKYGIESFALIHDSFGTIPADAANLFKAVRETMVDTYESCDVLADFYDQFADQLHESQLDKMPALPAKGNLNLRDILESDFAFA

SEQ ID NO: 142 - DNA, 2652 bp, synthetic construct
  source 1..2652: mol_type = other DNA
atgaatacaattaacatagctaaaaatgatttcagcgatattgaactggctgcgatcccgtttaataccttggcggaccattatggtgagcgtctggcgcgtgagcaacttgctctggagcacgaatcctacgagatgggtgaagcgcgtttccggaagatgttcgagcgccagcttaaggctggcgaggtggcggataacgctgctgcgaagccgttgattacgaccctgctgccgaaaatgattgcgcgtattaacgattggttcgaggaagtgaaagcaaagcgtggtaaacgtccaaccgcattccagtttctgcaagagatcaagccggaggcggtggcatacattacgatcaaaaccactctcgcatgtctcaccagcgcggataatactacggtccaagcggtggccagcgcgattggccgcgcgattgaggacgaagcgcgttttggtcgcattcgtgacctggaagcgaaacattttaagaagaacgttgaagaacaattgaataaacgcgtgggccacgtttacaagaaagcgttcatgcaagtcgttgaagctgatatgctgagcaaaggcctgttaggtggtgaagcatggagcagctggcataaggaggactcaattcacgtcggcgtgcggtgcattgaaatgctgatcgaatcgaccggtatggttagcctgcatcgccaaaacgccggcgtggtgggtcaagatagcgaaacgattgaactggcgccagagtacgcggaagctatcgctaccagagccggcgcattggcggggatcagcccgatgttccagccgtgtgttgtaccaccgaagccgtggaccggtatcaccggtggaggttactgggcgaatggtagacgtccgttggcgttggttcgtacccatagcaaaaaggctctgatgcgttatgaagacgtttacatgccggaagtgtacaaagccatcaacatcgcgcagaacactgcgtggaaaatcaacaaaaaggtgttagctgtggcgaacgtaattacaaaatggaagcactgcccggttgaggacatcccggctattgaacgtgaagagctgccaatgaaaccagaggacattgacatgaatccggaggcgctgaccgcatggaaacgtgcggcagcagcggtctatcgtaaggataaagccagaaagagccgtcgtatctccctggaattcatgcttgagcaggcgaacaaattcgctaaccacaaagccatctggtttccgtataatatggattggcgtggtcgtgtttacgcggtatcgatgttcaacccgcagggtaatgacatgaccaagggtttgttgaccttggccaaaggtaaaccgattggcaaagaaggttactattggttgaagatccacggtgcgaactgcgcaggggtggataaggtaccgttcccggaacgtattaaattcatcgaggaaaaccacgaaaacattatggcgtgcgcaaagagcccgctggaaaacacgtggtgggcagagcaggacagtccattctgcttcttggcgttctgtttcgaatatgcaggtgtccagcaccacggcctgagctataactgcagcctgccgctggcctttgatggttcttgtagcggtattcaacactttagcgccatgctgcgcgatgaggttggtggcagagcagtgaatctgctgccaagcgaaaccgtgcaagatatctatggcattgtggctaagaaggttaatgaaatcctgcaagcagacgcgattaacggcacggacaacgaggttgtcaccgtgaccgatgaaaacaccggtgagatctcggagaaagtgaaactgggcaccaaagccttggctggccaatggctggcatacggcgttactcgctccgtgaccaagcgttcggtgatgacccttgcttacggcagcaaagagtttggtttccgccaacaggttctggaggatactatccaaccggccatcgactctggtaaaggcctgatgttcacgcagccgaatcaggcagcgggctatatggcgaagctgatttgggaatcggttagcgttaccgttgttgcagcggtggaggctatgaactggctgaaatctgcggcgaagctgttagctgcggaggtgaaggacaagaagacgggcgaaatcctgcgtaagcgctgcgcagtgcattgggttacgccggatggttttccggtatggcaggagtacaaaaagcctattcagacccgtctgaacctgatgtttctgggtcaatttcgtctgcagccgacgatcaacaccaataaggactccgagatcgacgcgcacaaacaggagtctggcatcgcacccaatttcgttcactcacaggacggttcccatctgcgtaagaccgtcgtgtgggcacacgagaagtatggcattgagtcgtttgcattgatccacgattcctttggtaccatcccggcggacgctgcgaacctgtttaaagcggttcgcgaaaccatggttgacacctatgaaagttgcgatgttctggcagacttttatgatcagttcgccgaccaactgcatgagtcccagctggataaaatgccggcgttaccggcgaagggcaacttaaatctccgcgacatcctggaatctgatttcgccttcgcgtaa

SEQ ID NO: 143 - DNA, 2652 bp, synthetic construct
  source 1..2652: mol_type = other DNA
atgaatacaattaacatagctaaaaatgatttcagcgatattgaactggctgcgatcccgtttaataccttggcggaccattatggtgagcgtctggcgcgtgagcaacttgctctggagcacgaatcctacgagatgggtgaagcgcgtttccggaagatgttcgagcgccagcttaaggctggcgaggtggcggataacgctgctgcgaagccgttgattacgaccctgctgccgaaaatgattgcgcgtattaacgattggttcgaggaagtgaaagcaaagcgtggtaaacgtccaaccgcattccagtttctgcaagagatcaagccggaggcggtggcatacattacgatcaaaaccactctcgcatgtctcaccagcgcggataatactacggtccaagcggtggccagcgcgattggccgcgcgattgaggacgaagcgcgttttggtcgcattcgtgacctggaagcgaaacattttaagaagaacgttgaagaacaattgaatgcacgcgtgggccacgtttacaagaaagcgttcatgcaagtcgttgaagctgatatgctgagcaaaggcctgttaggtggtgaagcatggagcagctggcataaggaggactcaattcacgtcggcgtgcggtgcattgaaatgctgatcgaatcgaccggtatggttagcctgcatcgccaaaacgccggcgtggtgggtcaagatagcgaaacgattgaactggcgccagagtacgcggaagctatcgctaccagagccggcgcattggcggggatcagcccgatgttccagccgtgtgttgtaccaccgaagccgtggaccggtatcaccggtggaggttactgggcgaatggtagacgtccgttggcgttggttcgtacccatagcaaaaaggctctgatgcgttatgaagacgtttacatgccggaagtgtacaaagccatcaacatcgcgcagaacactgcgtggaaaatcaacaaaaaggtgttagctgtggcgaacgtaattacaaaatggaagcactgcccggttgaggacatcccggctattgaacgtgaagagctgccaatgaaaccagaggacattgacatgaatccggaggcgctgaccgcatggaaacgtgcggcagcagcggtctatcgtaaggataaagccagaaagagccgtcgtatctccctggaattcatgcttgagcaggcgaacaaattcgctaaccacaaagccatctggtttccgtataatatggattggcgtggtcgtgtttacgcggtatcgatgttcaacccgcagggtaatgacatgaccaagggtttgttgaccttggccaaaggtaaaccgattggcaaagaaggttactattggttgaagatccacggtgcgaactgcgcaggggtggataaggtaccgttcccggaacgtattaaattcatcgaggaaaaccacgaaaacattatggcgtgcgcaaagagcccgctggaaaacacgtggtgggcagagcaggacagtccattctgcttcttggcgttctgtttcgaatatgcaggtgtccagcaccacggcctgagctataactgcagcctgccgctggcctttgatggttcttgtagcggtattcaacactttagcgccatgctgcgcgatgaggttggtggcagagcagtgaatctgctgccaagcgaaaccgtgcaagatatctatggcattgtggctaagaaggttaatgaaatcctgcaagcagacgcgattaacggcacggacaacgaggttgtcaccgtgaccgatgaaaacaccggtgagatctcggagaaagtgaaactgggcaccaaagccttggctggccaatggctggcatacggcgttactcgctccgtgaccaagcgttcggtgatgacccttgcttacggcagcaaagagtttggtttccgccaacaggttctggaggatactatccaaccggccatcgactctggtaaaggcctgatgttcacgcagccgaatcaggcagcgggctatatggcgaagctgatttgggaatcggttagcgttaccgttgttgcagcggtggaggctatgaactggctgaaatctgcggcgaagctgttagctgcggaggtgaaggacaagaagacgggcgaaatcctgcgtaagcgctgcgcagtgcattgggttacgccggatggttttccggtatggcaggagtacaaaaagcctattcagacccgtctgaacctgatgtttctgggtcaatttcgtctgcagccgacgatcaacaccaataaggactccgagatcgacgcgcacaaacaggagtctggcatcgcacccaatttcgttcactcacaggacggttcccatctgcgtaagaccgtcgtgtgggcacacgagaagtatggcattgagtcgtttgcattgatccacgattcctttggtaccatcccggcggacgctgcgaacctgtttaaagcggttcgcgaaaccatggttgacacctatgaaagttgcgatgttctggcagacttttatgatcagttcgccgaccaactgcatgagtcccagctggataaaatgccggcgttaccggcgaagggcaacttaaatctccgcgacatcctggaatctgatttcgccttcgcgtaa

SEQ ID NO: 144 - DNA, 2652 bp, synthetic construct
  source 1..2652: mol_type = other DNA
atgaatacaattaacatagctaaaaatgatttcagcgatattgaactggctgcgatcccgtttaataccttggcggaccattatggtgagcgtctggcgcgtgagcaacttgctctggagcacgaatcctacgagatgggtgaagcgcgtttccggaagatgttcgagcgccagcttaaggctggcgaggtggcggataacgctgctgcgaagccgttgattacgaccctgctgccgaaaatgattgcgcgtattaacgattggttcgaggaagtgaaagcaaagcgtggtaaacgtccaaccgcattccagtttctgcaagagatcaagccggaggcggtggcatacattacgatcaaaaccactctcgcatgtctcaccagcgcggataatactacggtccaagcggtggccagcgcgattggccgcgcgattgaggacgaagcgcgttttggtcgcattcgtgacctggaagcgaaacattttaagaagaacgttgaagaacaattgaatggacgcgtgggccacgtttacaagaaagcgttcatgcaagtcgttgaagctgatatgctgagcaaaggcctgttaggtggtgaagcatggagcagctggcataaggaggactcaattcacgtcggcgtgcggtgcattgaaatgctgatcgaatcgaccggtatggttagcctgcatcgccaaaacgccggcgtggtgggtcaagatagcgaaacgattgaactggcgccagagtacgcggaagctatcgctaccagagccggcgcattggcggggatcagcccgatgttccagccgtgtgttgtaccaccgaagccgtggaccggtatcaccggtggaggttactgggcgaatggtagacgtccgttggcgttggttcgtacccatagcaaaaaggctctgatgcgttatgaagacgtttacatgccggaagtgtacaaagccatcaacatcgcgcagaacactgcgtggaaaatcaacaaaaaggtgttagctgtggcgaacgtaattacaaaatggaagcactgcccggttgaggacatcccggctattgaacgtgaagagctgccaatgaaaccagaggacattgacatgaatccggaggcgctgaccgcatggaaacgtgcggcagcagcggtctatcgtaaggataaagccagaaagagccgtcgtatctccctggaattcatgcttgagcaggcgaacaaattcgctaaccacaaagccatctggtttccgtataatatggattggcgtggtcgtgtttacgcggtatcgatgttcaacccgcagggtaatgacatgaccaagggtttgttgaccttggccaaaggtaaaccgattggcaaagaaggttactattggttgaagatccacggtgcgaactgcgcaggggtggataaggtaccgttcccggaacgtattaaattcatcgaggaaaaccacgaaaacattatggcgtgcgcaaagagcccgctggaaaacacgtggtgggcagagcaggacagtccattctgcttcttggcgttctgtttcgaatatgcaggtgtccagcaccacggcctgagctataactgcagcctgccgctggcctttgatggttcttgtagcggtattcaacactttagcgccatgctgcgcgatgaggttggtggcagagcagtgaatctgctgccaagcgaaaccgtgcaagatatctatggcattgtggctaagaaggttaatgaaatcctgcaagcagacgcgattaacggcacggacaacgaggttgtcaccgtgaccgatgaaaacaccggtgagatctcggagaaagtgaaactgggcaccaaagccttggctggccaatggctggcatacggcgttactcgctccgtgaccaagcgttcggtgatgacccttgcttacggcagcaaagagtttggtttccgccaacaggttctggaggatactatccaaccggccatcgactctggtaaaggcctgatgttcacgcagccgaatcaggcagcgggctatatggcgaagctgatttgggaatcggttagcgttaccgttgttgcagcggtggaggctatgaactggctgaaatctgcggcgaagctgttagctgcggaggtgaaggacaagaagacgggcgaaatcctgcgtaagcgctgcgcagtgcattgggttacgccggatggttttccggtatggcaggagtacaaaaagcctattcagacccgtctgaacctgatgtttctgggtcaatttcgtctgcagccgacgatcaacaccaataaggactccgagatcgacgcgcacaaacaggagtctggcatcgcacccaatttcgttcactcacaggacggttcccatctgcgtaagaccgtcgtgtgggcacacgagaagtatggcattgagtcgtttgcattgatccacgattcctttggtaccatcccggcggacgctgcgaacctgtttaaagcggttcgcgaaaccatggttgacacctatgaaagttgcgatgttctggcagacttttatgatcagttcgccgaccaactgcatgagtcccagctggataaaatgccggcgttaccggcgaagggcaacttaaatctccgcgacatcctggaatctgatttcgccttcgcgtaa

SEQ ID NO: 145 - DNA, 2649 bp, synthetic construct
  source 1..2649: mol_type = other DNA
atgaatacaattaacatagctaaaaatgatttcagcgatattgaactggctgcgatcccgtttaataccttggcggaccattatggtgagcgtctggcgcgtgagcaacttgctctggagcacgaatcctacgagatgggtgaagcgcgtttccggaagatgttcgagcgccagcttaaggctggcgaggtggcggataacgctgctgcgaagccgttgattacgaccctgctgccgaaaatgattgcgcgtattaacgattggttcgaggaagtgaaagcaaagcgtggtaaacgtccaaccgcattccagtttctgcaagagatcaagccggaggcggtggcatacattacgatcaaaaccactctcgcatgtctcaccagcgcggataatactacggtccaagcggtggccagcgcgattggccgcgcgattgaggacgaagcgcgttttggtcgcattcgtgacctggaagcgaaacattttaagaagaacgttgaagaacaattgaatcgcgtgggccacgtttacaagaaagcgttcatgcaagtcgttgaagctgatatgctgagcaaaggcctgttaggtggtgaagcatggagcagctggcataaggaggactcaattcacgtcggcgtgcggtgcattgaaatgctgatcgaatcgaccggtatggttagcctgcatcgccaaaacgccggcgtggtgggtcaagatagcgaaacgattgaactggcgccagagtacgcggaagctatcgctaccagagccggcgcattggcggggatcagcccgatgttccagccgtgtgttgtaccaccgaagccgtggaccggtatcaccggtggaggttactgggcgaatggtagacgtccgttggcgttggttcgtacccatagcaaaaaggctctgatgcgttatgaagacgtttacatgccggaagtgtacaaagccatcaacatcgcgcagaacactgcgtggaaaatcaacaaaaaggtgttagctgtggcgaacgtaattacaaaatggaagcactgcccggttgaggacatcccggctattgaacgtgaagagctgccaatgaaaccagaggacattgacatgaatccggaggcgctgaccgcatggaaacgtgcggcagcagcggtctatcgtaaggataaagccagaaagagccgtcgtatctccctggaattcatgcttgagcaggcgaacaaattcgctaaccacaaagccatctggtttccgtataatatggattggcgtggtcgtgtttacgcggtatcgatgttcaacccgcagggtaatgacatgaccaagggtttgttgaccttggccaaaggtaaaccgattggcaaagaaggttactattggttgaagatccacggtgcgaactgcgcaggggtggataaggtaccgttcccggaacgtattaaattcatcgaggaaaaccacgaaaacattatggcgtgcgcaaagagcccgctggaaaacacgtggtgggcagagcaggacagtccattctgcttcttggcgttctgtttcgaatatgcaggtgtccagcaccacggcctgagctataactgcagcctgccgctggcctttgatggttcttgtagcggtattcaacactttagcgccatgctgcgcgatgaggttggtggcagagcagtgaatctgctgccaagcgaaaccgtgcaagatatctatggcattgtggctaagaaggttaatgaaatcctgcaagcagacgcgattaacggcacggacaacgaggttgtcaccgtgaccgatgaaaacaccggtgagatctcggagaaagtgaaactgggcaccaaagccttggctggccaatggctggcatacggcgttactcgctccgtgaccaagcgttcggtgatgacccttgcttacggcagcaaagagtttggtttccgccaacaggttctggaggatactatccaaccggccatcgactctggtaaaggcctgatgttcacgcagccgaatcaggcagcgggctatatggcgaagctgatttgggaatcggttagcgttaccgttgttgcagcggtggaggctatgaactggctgaaatctgcggcgaagctgttagctgcggaggtgaaggacaagaagacgggcgaaatcctgcgtaagcgctgcgcagtgcattgggttacgccggatggttttccggtatggcaggagtacaaaaagcctattcagacccgtctgaacctgatgtttctgggtcaatttcgtctgcagccgacgatcaacaccaataaggactccgagatcgacgcgcacaaacaggagtctggcatcgcacccaatttcgttcactcacaggacggttcccatctgcgtaagaccgtcgtgtgggcacacgagaagtatggcattgagtcgtttgcattgatccacgattcctttggtaccatcccggcggacgctgcgaacctgtttaaagcggttcgcgaaaccatggttgacacctatgaaagttgcgatgttctggcagacttttatgatcagttcgccgaccaactgcatgagtcccagctggataaaatgccggcgttaccggcgaagggcaacttaaatctccgcgacatcctggaatctgatttcgccttcgcgtaa

SEQ ID NO: 146 - DNA, 2649 bp, synthetic construct
  source 1..2649: mol_type = other DNA
atgaatacaattaacatagctaaaaatgatttcagcgatattgaactggctgcgatcccgtttaataccttggcggaccattatggtgagcgtctggcgcgtgagcaacttgctctggagcacgaatcctacgagatgggtgaagcgcgtttccggaagatgttcgagcgccagcttaaggctggcgaggtggcggataacgctgctgcgaagccgttgattacgaccctgctgccgaaaatgattgcgcgtattaacgattggttcgaggaagtgaaagcaaagcgtggtaaacgtccaaccgcattccagtttctgcaagagatcaagccggaggcggtggcatacattacgatcaaaaccactctcgcatgtctcaccagcgcggataatactacggtccaagcggtggccagcgcgattggccgcgcgattgaggacgaagcgcgttttggtcgcattcgtgacctggaagcgaaacattttaagaagaacgttgaagaacaattgaataaagtgggccacgtttacaagaaagcgttcatgcaagtcgttgaagctgatatgctgagcaaaggcctgttaggtggtgaagcatggagcagctggcataaggaggactcaattcacgtcggcgtgcggtgcattgaaatgctgatcgaatcgaccggtatggttagcctgcatcgccaaaacgccggcgtggtgggtcaagatagcgaaacgattgaactggcgccagagtacgcggaagctatcgctaccagagccggcgcattggcggggatcagcccgatgttccagccgtgtgttgtaccaccgaagccgtggaccggtatcaccggtggaggttactgggcgaatggtagacgtccgttggcgttggttcgtacccatagcaaaaaggctctgatgcgttatgaagacgtttacatgccggaagtgtacaaagccatcaacatcgcgcagaacactgcgtggaaaatcaacaaaaaggtgttagctgtggcgaacgtaattacaaaatggaagcactgcccggttgaggacatcccggctattgaacgtgaagagctgccaatgaaaccagaggacattgacatgaatccggaggcgctgaccgcatggaaacgtgcggcagcagcggtctatcgtaaggataaagccagaaagagccgtcgtatctccctggaattcatgcttgagcaggcgaacaaattcgctaaccacaaagccatctggtttccgtataatatggattggcgtggtcgtgtttacgcggtatcgatgttcaacccgcagggtaatgacatgaccaagggtttgttgaccttggccaaaggtaaaccgattggcaaagaaggttactattggttgaagatccacggtgcgaactgcgcaggggtggataaggtaccgttcccggaacgtattaaattcatcgaggaaaaccacgaaaacattatggcgtgcgcaaagagcccgctggaaaacacgtggtgggcagagcaggacagtccattctgcttcttggcgttctgtttcgaatatgcaggtgtccagcaccacggcctgagctataactgcagcctgccgctggcctttgatggttcttgtagcggtattcaacactttagcgccatgctgcgcgatgaggttggtggcagagcagtgaatctgctgccaagcgaaaccgtgcaagatatctatggcattgtggctaagaaggttaatgaaatcctgcaagcagacgcgattaacggcacggacaacgaggttgtcaccgtgaccgatgaaaacaccggtgagatctcggagaaagtgaaactgggcaccaaagccttggctggccaatggctggcatacggcgttactcgctccgtgaccaagcgttcggtgatgacccttgcttacggcagcaaagagtttggtttccgccaacaggttctggaggatactatccaaccggccatcgactctggtaaaggcctgatgttcacgcagccgaatcaggcagcgggctatatggcgaagctgatttgggaatcggttagcgttaccgttgttgcagcggtggaggctatgaactggctgaaatctgcggcgaagctgttagctgcggaggtgaaggacaagaagacgggcgaaatcctgcgtaagcgctgcgcagtgcattgggttacgccggatggttttccggtatggcaggagtacaaaaagcctattcagacccgtctgaacctgatgtttctgggtcaatttcgtctgcagccgacgatcaacaccaataaggactccgagatcgacgcgcacaaacaggagtctggcatcgcacccaatttcgttcactcacaggacggttcccatctgcgtaagaccgtcgtgtgggcacacgagaagtatggcattgagtcgtttgcattgatccacgattcctttggtaccatcccggcggacgctgcgaacctgtttaaagcggttcgcgaaaccatggttgacacctatgaaagttgcgatgttctggcagacttttatgatcagttcgccgaccaactgcatgagtcccagctggataaaatgccggcgttaccggcgaagggcaacttaaatctccgcgacatcctggaatctgatttcgccttcgcgtaa

SEQ ID NO: 147 - DNA, 2652 bp, synthetic construct
  source 1..2652: mol_type = other DNA
atgaatacaattaacatagctaaaaatgatttcagcgatattgaactggctgcgatcccgtttaataccttggcggaccattatggtgagcgtctggcgcgtgagcaacttgctctggagcacgaatcctacgagatgggtgaagcgcgtttccggaagatgttcgagcgccagcttaaggctggcgaggtggcggataacgctgctgcgaagccgttgattacgaccctgctgccgaaaatgattgcgcgtattaacgattggttcgaggaagtgaaagcaaagcgtggtaaacgtccaaccgcattccagtttctgcaagagatcaagccggaggcggtggcatacattacgatcaaaaccactctcgcatgtctcaccagcgcggataatactacggtccaagcggtggccagcgcgattggccgcgcgattgaggacgaagcgcgttttggtcgcattcgtgacctggaagcgaaacattttaagaagaacgttgaagaacaattgaataaatgtgtgggccacgtttacaagaaagcgttcatgcaagtcgttgaagctgatatgctgagcaaaggcctgttaggtggtgaagcatggagcagctggcataaggaggactcaattcacgtcggcgtgcggtgcattgaaatgctgatcgaatcgaccggtatggttagcctgcatcgccaaaacgccggcgtggtgggtcaagatagcgaaacgattgaactggcgccagagtacgcggaagctatcgctaccagagccggcgcattggcggggatcagcccgatgttccagccgtgtgttgtaccaccgaagccgtggaccggtatcaccggtggaggttactgggcgaatggtagacgtccgttggcgttggttcgtacccatagcaaaaaggctctgatgcgttatgaagacgtttacatgccggaagtgtacaaagccatcaacatcgcgcagaacactgcgtggaaaatcaacaaaaaggtgttagctgtggcgaacgtaattacaaaatggaagcactgcccggttgaggacatcccggctattgaacgtgaagagctgccaatgaaaccagaggacattgacatgaatccggaggcgctgaccgcatggaaacgtgcggcagcagcggtctatcgtaaggataaagccagaaagagccgtcgtatctccctggaattcatgcttgagcaggcgaacaaattcgctaaccacaaagccatctggtttccgtataatatggattggcgtggtcgtgtttacgcggtatcgatgttcaacccgcagggtaatgacatgaccaagggtttgttgaccttggccaaaggtaaaccgattggcaaagaaggttactattggttgaagatccacggtgcgaactgcgcaggggtggataaggtaccgttcccggaacgtattaaattcatcgaggaaaaccacgaaaacattatggcgtgcgcaaagagcccgctggaaaacacgtggtgggcagagcaggacagtccattctgcttcttggcgttctgtttcgaatatgcaggtgtccagcaccacggcctgagctataactgcagcctgccgctggcctttgatggttcttgtagcggtattcaacactttagcgccatgctgcgcgatgaggttggtggcagagcagtgaatctgctgccaagcgaaaccgtgcaagatatctatggcattgtggctaagaaggttaatgaaatcctgcaagcagacgcgattaacggcacggacaacgaggttgtcaccgtgaccgatgaaaacaccggtgagatctcggagaaagtgaaactgggcaccaaagccttggctggccaatggctggcatacggcgttactcgctccgtgaccaagcgttcggtgatgacccttgcttacggcagcaaagagtttggtttccgccaacaggttctggaggatactatccaaccggccatcgactctggtaaaggcctgatgttcacgcagccgaatcaggcagcgggctatatggcgaagctgatttgggaatcggttagcgttaccgttgttgcagcggtggaggctatgaactggctgaaatctgcggcgaagctgttagctgcggaggtgaaggacaagaagacgggcgaaatcctgcgtaagcgctgcgcagtgcattgggttacgccggatggttttccggtatggcaggagtacaaaaagcctattcagacccgtctgaacctgatgtttctgggtcaatttcgtctgcagccgacgatcaacaccaataaggactccgagatcgacgcgcacaaacaggagtctggcatcgcacccaatttcgttcactcacaggacggttcccatctgcgtaagaccgtcgtgtgggcacacgagaagtatggcattgagtcgtttgcattgatccacgattcctttggtaccatcccggcggacgctgcgaacctgtttaaagcggttcgcgaaaccatggttgacacctatgaaagttgcgatgttctggcagacttttatgatcagttcgccgaccaactgcatgagtcccagctggataaaatgccggcgttaccggcgaagggcaacttaaatctccgcgacatcctggaatctgatttcgccttcgcgtaa

SEQ ID NO: 148 - DNA, 2652 bp, synthetic construct
  source 1..2652: mol_type = other DNA
atgaatacaattaacatagctaaaaatgatttcagcgatattgaactggctgcgatcccgtttaataccttggcggaccattatggtgagcgtctggcgcgtgagcaacttgctctggagcacgaatcctacgagatgggtgaagcgcgtttccggaagatgttcgagcgccagcttaaggctggcgaggtggcggataacgctgctgcgaagccgttgattacgaccctgctgccgaaaatgattgcgcgtattaacgattggttcgaggaagtgaaagcaaagcgtggtaaacgtccaaccgcattccagtttctgcaagagatcaagccggaggcggtggcatacattacgatcaaaaccactctcgcatgtctcaccagcgcggataatactacggtccaagcggtggccagcgcgattggccgcgcgattgaggacgaagcgcgttttggtcgcattcgtgacctggaagcgaaacattttaagaagaacgttgaagaacaattgaataaaggtgtgggccacgtttacaagaaagcgttcatgcaagtcgttgaagctgatatgctgagcaaaggcctgttaggtggtgaagcatggagcagctggcataaggaggactcaattcacgtcggcgtgcggtgcattgaaatgctgatcgaatcgaccggtatggttagcctgcatcgccaaaacgccggcgtggtgggtcaagatagcgaaacgattgaactggcgccagagtacgcggaagctatcgctaccagagccggcgcattggcggggatcagcccgatgttccagccgtgtgttgtaccaccgaagccgtggaccggtatcaccggtggaggttactgggcgaatggtagacgtccgttggcgttggttcgtacccatagcaaaaaggctctgatgcgttatgaagacgtttacatgccggaagtgtacaaagccatcaacatcgcgcagaacactgcgtggaaaatcaacaaaaaggtgttagctgtggcgaacgtaattacaaaatggaagcactgcccggttgaggacatcccggctattgaacgtgaagagctgccaatgaaaccagaggacattgacatgaatccggaggcgctgaccgcatggaaacgtgcggcagcagcggtctatcgtaaggataaagccagaaagagccgtcgtatctccctggaattcatgcttgagcaggcgaacaaattcgctaaccacaaagccatctggtttccgtataatatggattggcgtggtcgtgtttacgcggtatcgatgttcaacccgcagggtaatgacatgaccaagggtttgttgaccttggccaaaggtaaaccgattggcaaagaaggttactattggttgaagatccacggtgcgaactgcgcaggggtggataaggtaccgttcccggaacgtattaaattcatcgaggaaaaccacgaaaacattatggcgtgcgcaaagagcccgctggaaaacacgtggtgggcagagcaggacagtccattctgcttcttggcgttctgtttcgaatatgcaggtgtccagcaccacggcctgagctataactgcagcctgccgctggcctttgatggttcttgtagcggtattcaacactttagcgccatgctgcgcgatgaggttggtggcagagcagtgaatctgctgccaagcgaaaccgtgcaagatatctatggcattgtggctaagaaggttaatgaaatcctgcaagcagacgcgattaacggcacggacaacgaggttgtcaccgtgaccgatgaaaacaccggtgagatctcggagaaagtgaaactgggcaccaaagccttggctggccaatggctggcatacggcgttactcgctccgtgaccaagcgttcggtgatgacccttgcttacggcagcaaagagtttggtttccgccaacaggttctggaggatactatccaaccggccatcgactctggtaaaggcctgatgttcacgcagccgaatcaggcagcgggctatatggcgaagctgatttgggaatcggttagcgttaccgttgttgcagcggtggaggctatgaactggctgaaatctgcggcgaagctgttagctgcggaggtgaaggacaagaagacgggcgaaatcctgcgtaagcgctgcgcagtgcattgggttacgccggatggttttccggtatggcaggagtacaaaaagcctattcagacccgtctgaacctgatgtttctgggtcaatttcgtctgcagccgacgatcaacaccaataaggactccgagatcgacgcgcacaaacaggagtctggcatcgcacccaatttcgttcactcacaggacggttcccatctgcgtaagaccgtcgtgtgggcacacgagaagtatggcattgagtcgtttgcattgatccacgattcctttggtaccatcccggcggacgctgcgaacctgtttaaagcggttcgcgaaaccatggttgacacctatgaaagttgcgatgttctggcagacttttatgatcagttcgccgaccaactgcatgagtcccagctggataaaatgccggcgttaccggcgaagggcaacttaaatctccgcgacatcctggaatctgatttcgccttcgcgtaa

SEQ ID NO: 149 - DNA, 2652 bp, synthetic construct
  source 1..2652: mol_type = other DNA
atgaatacaattaacatagctaaaaatgatttcagcgatattgaactggctgcgatcccgtttaataccttggcggaccattatggtgagcgtctggcgcgtgagcaacttgctctggagcacgaatcctacgagatgggtgaagcgcgtttccggaagatgttcgagcgccagcttaaggctggcgaggtggcggataacgctgctgcgaagccgttgattacgaccctgctgccgaaaatgattgcgcgtattaacgattggttcgaggaagtgaaagcaaagcgtggtaaacgtccaaccgcattccagtttctgcaagagatcaagccggaggcggtggcatacattacgatcaaaaccactctcgcatgtctcaccagcgcggataatactacggtccaagcggtggccagcgcgattggccgcgcgattgaggacgaagcgcgttttggtcgcattcgtgacctggaagcgaaacattttaagaagaacgttgaagaacaattgaatgcagctgtgggccacgtttacaagaaagcgttcatgcaagtcgttgaagctgatatgctgagcaaaggcctgttaggtggtgaagcatggagcagctggcataaggaggactcaattcacgtcggcgtgcggtgcattgaaatgctgatcgaatcgaccggtatggttagcctgcatcgccaaaacgccggcgtggtgggtcaagatagcgaaacgattgaactggcgccagagtacgcggaagctatcgctaccagagccggcgcattggcggggatcagcccgatgttccagccgtgtgttgtaccaccgaagccgtggaccggtatcaccggtggaggttactgggcgaatggtagacgtccgttggcgttggttcgtacccatagcaaaaaggctctgatgcgttatgaagacgtttacatgccggaagtgtacaaagccatcaacatcgcgcagaacactgcgtggaaaatcaacaaaaaggtgttagctgtggcgaacgtaattacaaaatggaagcactgcccggttgaggacatcccggctattgaacgtgaagagctgccaatgaaaccagaggacattgacatgaatccggaggcgctgaccgcatggaaacgtgcggcagcagcggtctatcgtaaggataaagccagaaagagccgtcgtatctccctggaattcatgcttgagcaggcgaacaaattcgctaaccacaaagccatctggtttccgtataatatggattggcgtggtcgtgtttacgcggtatcgatgttcaacccgcagggtaatgacatgaccaagggtttgttgaccttggccaaaggtaaaccgattggcaaagaaggttactattggttgaagatccacggtgcgaactgcgcaggggtggataaggtaccgttcccggaacgtattaaattcatcgaggaaaaccacgaaaacattatggcgtgcgcaaagagcccgctggaaaacacgtggtgggcagagcaggacagtccattctgcttcttggcgttctgtttcgaatatgcaggtgtccagcaccacggcctgagctataactgcagcctgccgctggcctttgatggttcttgtagcggtattcaacactttagcgccatgctgcgcgatgaggttggtggcagagcagtgaatctgctgccaagcgaaaccgtgcaagatatctatggcattgtggctaagaaggttaatgaaatcctgcaagcagacgcgattaacggcacggacaacgaggttgtcaccgtgaccgatgaaaacaccggtgagatctcggagaaagtgaaactgggcaccaaagccttggctggccaatggctggcatacggcgttactcgctccgtgaccaagcgttcggtgatgacccttgcttacggcagcaaagagtttggtttccgccaacaggttctggaggatactatccaaccggccatcgactctggtaaaggcctgatgttcacgcagccgaatcaggcagcgggctatatggcgaagctgatttgggaatcggttagcgttaccgttgttgcagcggtggaggctatgaactggctgaaatctgcggcgaagctgttagctgcggaggtgaaggacaagaagacgggcgaaatcctgcgtaagcgctgcgcagtgcattgggttacgccggatggttttccggtatggcaggagtacaaaaagcctattcagacccgtctgaacctgatgtttctgggtcaatttcgtctgcagccgacgatcaacaccaataaggactccgagatcgacgcgcacaaacaggagtctggcatcgcacccaatttcgttcactcacaggacggttcccatctgcgtaagaccgtcgtgtgggcacacgagaagtatggcattgagtcgtttgcattgatccacgattcctttggtaccatcccggcggacgctgcgaacctgtttaaagcggttcgcgaaaccatggttgacacctatgaaagttgcgatgttctggcagacttttatgatcagttcgccgaccaactgcatgagtcccagctggataaaatgccggcgttaccggcgaagggcaacttaaatctccgcgacatcctggaatctgatttcgccttcgcgtaa

SEQ ID NO: 150 - DNA, 2652 bp, synthetic construct
  source 1..2652: mol_type = other DNA
atgaatacaattaacatagctaaaaatgatttcagcgatattgaactggctgcgatcccgtttaataccttggcggaccattatggtgagcgtctggcgcgtgagcaacttgctctggagcacgaatcctacgagatgggtgaagcgcgtttccggaagatgttcgagcgccagcttaaggctggcgaggtggcggataacgctgctgcgaagccgttgattacgaccctgctgccgaaaatgattgcgcgtattaacgattggttcgaggaagtgaaagcaaagcgtggtaaacgtccaaccgcattccagtttctgcaagagatcaagccggaggcggtggcatacattacgatcaaaaccactctcgcatgtctcaccagcgcggataatactacggtccaagcggtggccagcgcgattggccgcgcgattgaggacgaagcgcgttttggtcgcattcgtgacctggaagcgaaacattttaagaagaacgttgaagaacaattgaatggagctgtgggccacgtttacaagaaagcgttcatgcaagtcgttgaagctgatatgctgagcaaaggcctgttaggtggtgaagcatggagcagctggcataaggaggactcaattcacgtcggcgtgcggtgcattgaaatgctgatcgaatcgaccggtatggttagcctgcatcgccaaaacgccggcgtggtgggtcaagatagcgaaacgattgaactggcgccagagtacgcggaagctatcgctaccagagccggcgcattggcggggatcagcccgatgttccagccgtgtgttgtaccaccgaagccgtggaccggtatcaccggtggaggttactgggcgaatggtagacgtccgttggcgttggttcgtacccatagcaaaaaggctctgatgcgttatgaagacgtttacatgccggaagtgtacaaagccatcaacatcgcgcagaacactgcgtggaaaatcaacaaaaaggtgttagctgtggcgaacgtaattacaaaatggaagcactgcccggttgaggacatcccggctattgaacgtgaagagctgccaatgaaaccagaggacattgacatgaatccggaggcgctgaccgcatggaaacgtgcggcagcagcggtctatcgtaaggataaagccagaaagagccgtcgtatctccctggaattcatgcttgagcaggcgaacaaattcgctaaccacaaagccatctggtttccgtataatatggattggcgtggtcgtgtttacgcggtatcgatgttcaacccgcagggtaatgacatgaccaagggtttgttgaccttggccaaaggtaaaccgattggcaaagaaggttactattggttgaagatccacggtgcgaactgcgcaggggtggataaggtaccgttcccggaacgtattaaattcatcgaggaaaaccacgaaaacattatggcgtgcgcaaagagcccgctggaaaacacgtggtgggcagagcaggacagtccattctgcttcttggcgttctgtttcgaatatgcaggtgtccagcaccacggcctgagctataactgcagcctgccgctggcctttgatggttcttgtagcggtattcaacactttagcgccatgctgcgcgatgaggttggtggcagagcagtgaatctgctgccaagcgaaaccgtgcaagatatctatggcattgtggctaagaaggttaatgaaatcctgcaagcagacgcgattaacggcacggacaacgaggttgtcaccgtgaccgatgaaaacaccggtgagatctcggagaaagtgaaactgggcaccaaagccttggctggccaatggctggcatacggcgttactcgctccgtgaccaagcgttcggtgatgacccttgcttacggcagcaaagagtttggtttccgccaacaggttctggaggatactatccaaccggccatcgactctggtaaaggcctgatgttcacgcagccgaatcaggcagcgggctatatggcgaagctgatttgggaatcggttagcgttaccgttgttgcagcggtggaggctatgaactggctgaaatctgcggcgaagctgttagctgcggaggtgaaggacaagaagacgggcgaaatcctgcgtaagcgctgcgcagtgcattgggttacgccggatggttttccggtatggcaggagtacaaaaagcctattcagacccgtctgaacctgatgtttctgggtcaatttcgtctgcagccgacgatcaacaccaataaggactccgagatcgacgcgcacaaacaggagtctggcatcgcacccaatttcgttcactcacaggacggttcccatctgcgtaagaccgtcgtgtgggcacacgagaagtatggcattgagtcgtttgcattgatccacgattcctttggtaccatcccggcggacgctgcgaacctgtttaaagcggttcgcgaaaccatggttgacacctatgaaagttgcgatgttctggcagacttttatgatcagttcgccgaccaactgcatgagtcccagctggataaaatgccggcgttaccggcgaagggcaacttaaatctccgcgacatcctggaatctgatttcgccttcgcgtaa

SEQ ID NO: 151 - DNA, 2652 bp, synthetic construct
  source 1..2652: mol_type = other DNA
atgaatacaattaacatagctaaaaatgatttcagcgatattgaactggctgcgatcccgtttaataccttggcggaccattatggtgagcgtctggcgcgtgagcaacttgctctggagcacgaatcctacgagatgggtgaagcgcgtttccggaagatgttcgagcgccagcttaaggctggcgaggtggcggataacgctgctgcgaagccgttgattacgaccctgctgccgaaaatgattgcgcgtattaacgattggttcgaggaagtgaaagcaaagcgtggtaaacgtccaaccgcattccagtttctgcaagagatcaagccggaggcggtggcatacattacgatcaaaaccactctcgcatgtctcaccagcgcggataatactacggtccaagcggtggccagcgcgattggccgcgcgattgaggacgaagcgcgttttggtcgcattcgtgacctggaagcgaaacattttaagaagaacgttgaagaacaattgaatgcaggtgtgggccacgtttacaagaaagcgttcatgcaagtcgttgaagctgatatgctgagcaaaggcctgttaggtggtgaagcatggagcagctggcataaggaggactcaattcacgtcggcgtgcggtgcattgaaatgctgatcgaatcgaccggtatggttagcctgcatcgccaaaacgccggcgtggtgggtcaagatagcgaaacgattgaactggcgccagagtacgcggaagctatcgctaccagagccggcgcattggcggggatcagcccgatgttccagccgtgtgttgtaccaccgaagccgtggaccggtatcaccggtggaggttactgggcgaatggtagacgtccgttggcgttggttcgtacccatagcaaaaaggctctgatgcgttatgaagacgtttacatgccggaagtgtacaaagccatcaacatcgcgcagaacactgcgtggaaaatcaacaaaaaggtgttagctgtggcgaacgtaattacaaaatggaagcactgcccggttgaggacatcccggctattgaacgtgaagagctgccaatgaaaccagaggacattgacatgaatccggaggcgctgaccgcatggaaacgtgcggcagcagcggtctatcgtaaggataaagccagaaagagccgtcgtatctccctggaattcatgcttgagcaggcgaacaaattcgctaaccacaaagccatctggtttccgtataatatggattggcgtggtcgtgtttacgcggtatcgatgttcaacccgcagggtaatgacatgaccaagggtttgttgaccttggccaaaggtaaaccgattggcaaagaaggttactattggttgaagatccacggtgcgaactgcgcaggggtggataaggtaccgttcccggaacgtattaaattcatcgaggaaaaccacgaaaacattatggcgtgcgcaaagagcccgctggaaaacacgtggtgggcagagcaggacagtccattctgcttcttggcgttctgtttcgaatatgcaggtgtccagcaccacggcctgagctataactgcagcctgccgctggcctttgatggttcttgtagcggtattcaacactttagcgccatgctgcgcgatgaggttggtggcagagcagtgaatctgctgccaagcgaaaccgtgcaagatatctatggcattgtggctaagaaggttaatgaaatcctgcaagcagacgcgattaacggcacggacaacgaggttgtcaccgtgaccgatgaaaacaccggtgagatctcggagaaagtgaaactgggcaccaaagccttggctggccaatggctggcatacggcgttactcgctccgtgaccaagcgttcggtgatgacccttgcttacggcagcaaagagtttggtttccgccaacaggttctggaggatactatccaaccggccatcgactctggtaaaggcctgatgttcacgcagccgaatcaggcagcgggctatatggcgaagctgatttgggaatcggttagcgttaccgttgttgcagcggtggaggctatgaactggctgaaatctgcggcgaagctgttagctgcggaggtgaaggacaagaagacgggcgaaatcctgcgtaagcgctgcgcagtgcattgggttacgccggatggttttccggtatggcaggagtacaaaaagcctattcagacccgtctgaacctgatgtttctgggtcaatttcgtctgcagccgacgatcaacaccaataaggactccgagatcgacgcgcacaaacaggagtctggcatcgcacccaatttcgttcactcacaggacggttcccatctgcgtaagaccgtcgtgtgggcacacgagaagtatggcattgagtcgtttgcattgatccacgattcctttggtaccatcccggcggacgctgcgaacctgtttaaagcggttcgcgaaaccatggttgacacctatgaaagttgcgatgttctggcagacttttatgatcagttcgccgaccaactgcatgagtcccagctggataaaatgccggcgttaccggcgaagggcaacttaaatctccgcgacatcctggaatctgatttcgccttcgcgtaa

SEQ ID NO: 152 - DNA, 2652 bp, synthetic construct
  source 1..2652: mol_type = other DNA
atgaatacaattaacatagctaaaaatgatttcagcgatattgaactggctgcgatcccgtttaataccttggcggaccattatggtgagcgtctggcgcgtgagcaacttgctctggagcacgaatcctacgagatgggtgaagcgcgtttccggaagatgttcgagcgccagcttaaggctggcgaggtggcggataacgctgctgcgaagccgttgattacgaccctgctgccgaaaatgattgcgcgtattaacgattggttcgaggaagtgaaagcaaagcgtggtaaacgtccaaccgcattccagtttctgcaagagatcaagccggaggcggtggcatacattacgatcaaaaccactctcgcatgtctcaccagcgcggataatactacggtccaagcggtggccagcgcgattggccgcgcgattgaggacgaagcgcgttttggtcgcattcgtgacctggaagcgaaacattttaagaagaacgttgaagaacaattgaatggaggtgtgggccacgtttacaagaaagcgttcatgcaagtcgttgaagctgatatgctgagcaaaggcctgttaggtggtgaagcatggagcagctggcataaggaggactcaattcacgtcggcgtgcggtgcattgaaatgctgatcgaatcgaccggtatggttagcctgcatcgccaaaacgccggcgtggtgggtcaagatagcgaaacgattgaactggcgccagagtacgcggaagctatcgctaccagagccggcgcattggcggggatcagcccgatgttccagccgtgtgttgtaccaccgaagccgtggaccggtatcaccggtggaggttactgggcgaatggtagacgtccgttggcgttggttcgtacccatagcaaaaaggctctgatgcgttatgaagacgtttacatgccggaagtgtacaaagccatcaacatcgcgcagaacactgcgtggaaaatcaacaaaaaggtgttagctgtggcgaacgtaattacaaaatggaagcactgcccggttgaggacatcccggctattgaacgtgaagagctgccaatgaaaccagaggacattgacatgaatccggaggcgctgaccgcatggaaacgtgcggcagcagcggtctatcgtaaggataaagccagaaagagccgtcgtatctccctggaattcatgcttgagcaggcgaacaaattcgctaaccacaaagccatctggtttccgtataatatggattggcgtggtcgtgtttacgcggtatcgatgttcaacccgcagggtaatgacatgaccaagggtttgttgaccttggccaaaggtaaaccgattggcaaagaaggttactattggttgaagatccacggtgcgaactgcgcaggggtggataaggtaccgttcccggaacgtattaaattcatcgaggaaaaccacgaaaacattatggcgtgcgcaaagagcccgctggaaaacacgtggtgggcagagcaggacagtccattctgcttcttggcgttctgtttcgaatatgcaggtgtccagcaccacggcctgagctataactgcagcctgccgctggcctttgatggttcttgtagcggtattcaacactttagcgccatgctgcgcgatgaggttggtggcagagcagtgaatctgctgccaagcgaaaccgtgcaagatatctatggcattgtggctaagaaggttaatgaaatcctgcaagcagacgcgattaacggcacggacaacgaggttgtcaccgtgaccgatgaaaacaccggtgagatctcggagaaagtgaaactgggcaccaaagccttggctggccaatggctggcatacggcgttactcgctccgtgaccaagcgttcggtgatgacccttgcttacggcagcaaagagtttggtttccgccaacaggttctggaggatactatccaaccggccatcgactctggtaaaggcctgatgttcacgcagccgaatcaggcagcgggctatatggcgaagctgatttgggaatcggttagcgttaccgttgttgcagcggtggaggctatgaactggctgaaatctgcggcgaagctgttagctgcggaggtgaaggacaagaagacgggcgaaatcctgcgtaagcgctgcgcagtgcattgggttacgccggatggttttccggtatggcaggagtacaaaaagcctattcagacccgtctgaacctgatgtttctgggtcaatttcgtctgcagccgacgatcaacaccaataaggactccgagatcgacgcgcacaaacaggagtctggcatcgcacccaatttcgttcactcacaggacggttcccatctgcgtaagaccgtcgtgtgggcacacgagaagtatggcattgagtcgtttgcattgatccacgattcctttggtaccatcccggcggacgctgcgaacctgtttaaagcggttcgcgaaaccatggttgacacctatgaaagttgcgatgttctggcagacttttatgatcagttcgccgaccaactgcatgagtcccagctggataaaatgccggcgttaccggcgaagggcaacttaaatctccgcgacatcctggaatctgatttcgccttcgcgtaa

SEQ ID NO: 153 - DNA, 2646 bp, synthetic construct
  source 1..2646: mol_type = other DNA
atgaatacaattaacatagctaaaaatgatttcagcgatattgaactggctgcgatcccgtttaataccttggcggaccattatggtgagcgtctggcgcgtgagcaacttgctctggagcacgaatcctacgagatgggtgaagcgcgtttccggaagatgttcgagcgccagcttaaggctggcgaggtggcggataacgctgctgcgaagccgttgattacgaccctgctgccgaaaatgattgcgcgtattaacgattggttcgaggaagtgaaagcaaagcgtggtaaacgtccaaccgcattccagtttctgcaagagatcaagccggaggcggtggcatacattacgatcaaaaccactctcgcatgtctcaccagcgcggataatactacggtccaagcggtggccagcgcgattggccgcgcgattgaggacgaagcgcgttttggtcgcattcgtgacctggaagcgaaacattttaagaagaacgttgaagaacaattgaatgtgggccacgtttacaagaaagcgttcatgcaagtcgttgaagctgatatgctgagcaaaggcctgttaggtggtgaagcatggagcagctggcataaggaggactcaattcacgtcggcgtgcggtgcattgaaatgctgatcgaatcgaccggtatggttagcctgcatcgccaaaacgccggcgtggtgggtcaagatagcgaaacgattgaactggcgccagagtacgcggaagctatcgctaccagagccggcgcattggcggggatcagcccgatgttccagccgtgtgttgtaccaccgaagccgtggaccggtatcaccggtggaggttactgggcgaatggtagacgtccgttggcgttggttcgtacccatagcaaaaaggctctgatgcgttatgaagacgtttacatgccggaagtgtacaaagccatcaacatcgcgcagaacactgcgtggaaaatcaacaaaaaggtgttagctgtggcgaacgtaattacaaaatggaagcactgcccggttgaggacatcccggctattgaacgtgaagagctgccaatgaaaccagaggacattgacatgaatccggaggcgctgaccgcatggaaacgtgcggcagcagcggtctatcgtaaggataaagccagaaagagccgtcgtatctccctggaattcatgcttgagcaggcgaacaaattcgctaaccacaaagccatctggtttccgtataatatggattggcgtggtcgtgtttacgcggtatcgatgttcaacccgcagggtaatgacatgaccaagggtttgttgaccttggccaaaggtaaaccgattggcaaagaaggttactattggttgaagatccacggtgcgaactgcgcaggggtggataaggtaccgttcccggaacgtattaaattcatcgaggaaaaccacgaaaacattatggcgtgcgcaaagagcccgctggaaaacacgtggtgggcagagcaggacagtccattctgcttcttggcgttctgtttcgaatatgcaggtgtccagcaccacggcctgagctataactgcagcctgccgctggcctttgatggttcttgtagcggtattcaacactttagcgccatgctgcgcgatgaggttggtggcagagcagtgaatctgctgccaagcgaaaccgtgcaagatatctatggcattgtggctaagaaggttaatgaaatcctgcaagcagacgcgattaacggcacggacaacgaggttgtcaccgtgaccgatgaaaacaccggtgagatctcggagaaagtgaaactgggcaccaaagccttggctggccaatggctggcatacggcgttactcgctccgtgaccaagcgttcggtgatgacccttgcttacggcagcaaagagtttggtttccgccaacaggttctggaggatactatccaaccggccatcgactctggtaaaggcctgatgttcacgcagccgaatcaggcagcgggctatatggcgaagctgatttgggaatcggttagcgttaccgttgttgcagcggtggaggctatgaactggctgaaatctgcggcgaagctgttagctgcggaggtgaaggacaagaagacgggcgaaatcctgcgtaagcgctgcgcagtgcattgggttacgccggatggttttccggtatggcaggagtacaaaaagcctattcagacccgtctgaacctgatgtttctgggtcaatttcgtctgcagccgacgatcaacaccaataaggactccgagatcgacgcgcacaaacaggagtctggcatcgcacccaatttcgttcactcacaggacggttcccatctgcgtaagaccgtcgtgtgggcacacgagaagtatggcattgagtcgtttgcattgatccacgattcctttggtaccatcccggcggacgctgcgaacctgtttaaagcggttcgcgaaaccatggttgacacctatgaaagttgcgatgttctggcagacttttatgatcagttcgccgaccaactgcatgagtcccagctggataaaatgccggcgttaccggcgaagggcaacttaaatctccgcgacatcctggaatctgatttcgccttcgcgtaa

SEQ ID NO: 154 - DNA, 2646 bp, synthetic construct
  source 1..2646: mol_type = other DNA
atgaatacaattaacatagctaaaaatgatttcagcgatattgaactggctgcgatcccgtttaataccttggcggaccattatggtgagcgtctggcgcgtgagcaacttgctctggagcacgaatcctacgagatgggtgaagcgcgtttccggaagatgttcgagcgccagcttaaggctggcgaggtggcggataacgctgctgcgaagccgttgattacgaccctgctgccgaaaatgattgcgcgtattaacgattggttcgaggaagtgaaagcaaagcgtggtaaacgtccaaccgcattccagtttctgcaagagatcaagccggaggcggtggcatacattacgatcaaaaccactctcgcatgtctcaccagcgcggataatactacggtccaagcggtggccagcgcgattggccgcgcgattgaggacgaagcgcgttttggtcgcattcgtgacctggaagcgaaacattttaagaagaacgttgaagaacaattgaatgtgggccacgtttacaagaaagcgttcatgcaagtcgttgaagctgatatgctgagcaaaggcctgttaggtggtgaagcatggagcagctggcataaggaggactcaattcacgtcggcgtgcggtgcattgaaatgctgatcgaatcgaccggtatggttagcctgcatcgccaaaacgccggcgtggtgggtcaagatagcgaaacgattgaactggcgccagagtacgcggaagctatcgctaccagagccggcgcattggcggggatcagcccgatgttccagccgtgtgttgtaccaccgaagccgtggaccggtatcaccggtggaggttactgggcgaatggtagacgtccgttggcgttggttcgtacccatagcaaaaaggctctgatgcgttatgaagacgtttacatgccggaagtgtacaaagccatcaacatcgcgcagaacactgcgtggaaaatcaacaaaaaggtgttagctgtggcgaacgtaattacaaaatggaagcactgcccggttgaggacatcccggctattgaacgtgaagagctgccaatgaaaccagaggacattgacatgaatccggaggcgctgaccgcatggaaacgtgcggcagcagcggtcgcccgtaaggataaagccagaaagagccgtcgtatctccctggaattcatgcttgagcaggcgaacaaattcgctaaccacaaagccatctggtttccgtataatatggattggcgtggtcgtgtttacgcggtatcgatgttcaacccgcagggtaatgacatgaccaagggtttgttgaccttggccaaaggtaaaccgattggcaaagaaggttactattggttgaagatccacggtgcgaactgcgcaggggtggataaggtaccgttcccggaacgtattaaattcatcgaggaaaaccacgaaaacattatggcgtgcgcaaagagcccgctggaaaacacgtggtgggcagagcaggacagtccattctgcttcttggcgttctgtttcgaatatgcaggtgtccagcaccacggcctgagctataactgcagcctgccgctggcctttgatggttcttgtagcggtattcaacactttagcgccatgctgcgcgatgaggttggtggcagagcagtgaatctgctgccaagcgaaaccgtgcaagatatctatggcattgtggctaagaaggttaatgaaatcctgcaagcagacgcgattaacggcacggacaacgaggttgtcaccgtgaccgatgaaaacaccggtgagatctcggagaaagtgaaactgggcaccaaagccttggctggccaatggctggcatacggcgttactcgctccgtgaccaagcgttcggtgatgacccttgcttacggcagcaaagagtttggtttccgccaacaggttctggaggatactatccaaccggccatcgactctggtaaaggcctgatgttcacgcagccgaatcaggcagcgggctatatggcgaagctgatttgggaatcggttagcgttaccgttgttgcagcggtggaggctatgaactggctgaaatctgcggcgaagctgttagctgcggaggtgaaggacaagaagacgggcgaaatcctgcgtaagcgctgcgcagtgcattgggttacgccggatggttttccggtatggcaggagtacaaaaagcctattcagacccgtctgaacctgatgtttctgggtcaatttcgtctgcagccgacgatcaacaccaataaggactccgagatcgacgcgcacaaacaggagtctggcatcgcacccaatttcgttcactcacaggacggttcccatctgcgtaagaccgtcgtgtgggcacacgagaagtatggcattgagtcgtttgcattgatccacgattcctttggtaccatcccggcggacgctgcgaacctgtttaaagcggttcgcgaaaccatggttgacacctatgaaagttgcgatgttctggcagacttttatgatcagttcgccgaccaactgcatgagtcccagctggataaaatgccggcgttaccggcgaagggcaacttaaatctccgcgacatcctggaatctgatttcgccttcgcgtaa

SEQ ID NO: 155 - DNA, 2646 bp, synthetic construct
  source 1..2646: mol_type = other DNA
atgaatacaattaacatagctaaaaatgatttcagcgatattgaactggctgcgatcccgtttaataccttggcggaccattatggtgagcgtctggcgcgtgagcaacttgctctggagcacgaatcctacgagatgggtgaagcgcgtttccggaagatgttcgagcgccagcttaaggctggcgaggtggcggataacgctgctgcgaagccgttgattacgaccctgctgccgaaaatgattgcgcgtattaacgattggttcgaggaagtgaaagcaaagcgtggtaaacgtccaaccgcattccagtttctgcaagagatcaagccggaggcggtggcatacattacgatcaaaaccactctcgcatgtctcaccagcgcggataatactacggtccaagcggtggccagcgcgattggccgcgcgattgaggacgaagcgcgttttggtcgcattcgtgacctggaagcgaaacattttaagaagaacgttgaagaacaattgaatgtgggccacgtttacaagaaagcgttcatgcaagtcgttgaagctgatatgctgagcaaaggcctgttaggtggtgaagcatggagcagctggcataaggaggactcaattcacgtcggcgtgcggtgcattgaaatgctgatcgaatcgaccggtatggttagcctgcatcgccaaaacgccggcgtggtgggtcaagatagcgaaacgattgaactggcgccagagtacgcggaagctatcgctaccagagccggcgcattggcggggatcagcccgatgttccagccgtgtgttgtaccaccgaagccgtggaccggtatcaccggtggaggttactgggcgaatggtagacgtccgttggcgttggttcgtacccatagcaaaaaggctctgatgcgttatgaagacgtttacatgccggaagtgtacaaagccatcaacatcgcgcagaacactgcgtggaaaatcaacaaaaaggtgttagctgtggcgaacgtaattacaaaatggaagcactgcccggttgaggacatcccggctattgaacgtgaagagctgccaatgaaaccagaggacattgacatgaatccggaggcgctgaccgcatggaaacgtgcggcagcagcggtctatcgtaaggccaaagccagaaagagccgtcgtatctccctggaattcatgcttgagcaggcgaacaaattcgctaaccacaaagccatctggtttccgtataatatggattggcgtggtcgtgtttacgcggtatcgatgttcaacccgcagggtaatgacatgaccaagggtttgttgaccttggccaaaggtaaaccgattggcaaagaaggttactattggttgaagatccacggtgcgaactgcgcaggggtggataaggtaccgttcccggaacgtattaaattcatcgaggaaaaccacgaaaacattatggcgtgcgcaaagagcccgctggaaaacacgtggtgggcagagcaggacagtccattctgcttcttggcgttctgtttcgaatatgcaggtgtccagcaccacggcctgagctataactgcagcctgccgctggcctttgatggttcttgtagcggtattcaacactttagcgccatgctgcgcgatgaggttggtggcagagcagtgaatctgctgccaagcgaaaccgtgcaagatatctatggcattgtggctaagaaggttaatgaaatcctgcaagcagacgcgattaacggcacggacaacgaggttgtcaccgtgaccgatgaaaacaccggtgagatctcggagaaagtgaaactgggcaccaaagccttggctggccaatggctggcatacggcgttactcgctccgtgaccaagcgttcggtgatgacccttgcttacggcagcaaagagtttggtttccgccaacaggttctggaggatactatccaaccggccatcgactctggtaaaggcctgatgttcacgcagccgaatcaggcagcgggctatatggcgaagctgatttgggaatcggttagcgttaccgttgttgcagcggtggaggctatgaactggctgaaatctgcggcgaagctgttagctgcggaggtgaaggacaagaagacgggcgaaatcctgcgtaagcgctgcgcagtgcattgggttacgccggatggttttccggtatggcaggagtacaaaaagcctattcagacccgtctgaacctgatgtttctgggtcaatttcgtctgcagccgacgatcaacaccaataaggactccgagatcgacgcgcacaaacaggagtctggcatcgcacccaatttcgttcactcacaggacggttcccatctgcgtaagaccgtcgtgtgggcacacgagaagtatggcattgagtcgtttgcattgatccacgattcctttggtaccatcccggcggacgctgcgaacctgtttaaagcggttcgcgaaaccatggttgacacctatgaaagttgcgatgttctggcagacttttatgatcagttcgccgaccaactgcatgagtcccagctggataaaatgccggcgttaccggcgaagggcaacttaaatctccgcgacatcctggaatctgatttcgccttcgcgtaa

SEQ ID NO: 156 - DNA, 2646 bp, synthetic construct
  source 1..2646: mol_type = other DNA
atgaatacaattaacatagctaaaaatgatttcagcgatattgaactggctgcgatcccgtttaataccttggcggaccattatggtgagcgtctggcgcgtgagcaacttgctctggagcacgaatcctacgagatgggtgaagcgcgtttccggaagatgttcgagcgccagcttaaggctggcgaggtggcggataacgctgctgcgaagccgttgattacgaccctgctgccgaaaatgattgcgcgtattaacgattggttcgaggaagtgaaagcaaagcgtggtaaacgtccaaccgcattccagtttctgcaagagatcaagccggaggcggtggcatacattacgatcaaaaccactctcgcatgtctcaccagcgcggataatactacggtccaagcggtggccagcgcgattggccgcgcgattgaggacgaagcgcgttttggtcgcattcgtgacctggaagcgaaacattttaagaagaacgttgaagaacaattgaatgtgggccacgtttacaagaaagcgttcatgcaagtcgttgaagctgatatgctgagcaaaggcctgttaggtggtgaagcatggagcagctggcataaggaggactcaattcacgtcggcgtgcggtgcattgaaatgctgatcgaatcgaccggtatggttagcctgcatcgccaaaacgccggcgtggtgggtcaagatagcgaaacgattgaactggcgccagagtacgcggaagctatcgctaccagagccggcgcattggcggggatcagcccgatgttccagccgtgtgttgtaccaccgaagccgtggaccggtatcaccggtggaggttactgggcgaatggtagacgtccgttggcgttggttcgtacccatagcaaaaaggctctgatgcgttatgaagacgtttacatgccggaagtgtacaaagccatcaacatcgcgcagaacactgcgtggaaaatcaacaaaaaggtgttagctgtggcgaacgtaattacaaaatggaagcactgcccggttgaggacatcccggctattgaacgtgaagagctgccaatgaaaccagaggacattgacatgaatccggaggcgctgaccgcatggaaacgtgcggcagcagcggtctatcgtaagggtaaagccagaaagagccgtcgtatctccctggaattcatgcttgagcaggcgaacaaattcgctaaccacaaagccatctggtttccgtataatatggattggcgtggtcgtgtttacgcggtatcgatgttcaacccgcagggtaatgacatgaccaagggtttgttgaccttggccaaaggtaaaccgattggcaaagaaggttactattggttgaagatccacggtgcgaactgcgcaggggtggataaggtaccgttcccggaacgtattaaattcatcgaggaaaaccacgaaaacattatggcgtgcgcaaagagcccgctggaaaacacgtggtgggcagagcaggacagtccattctgcttcttggcgttctgtttcgaatatgcaggtgtccagcaccacggcctgagctataactgcagcctgccgctggcctttgatggttcttgtagcggtattcaacactttagcgccatgctgcgcgatgaggttggtggcagagcagtgaatctgctgccaagcgaaaccgtgcaagatatctatggcattgtggctaagaaggttaatgaaatcctgcaagcagacgcgattaacggcacggacaacgaggttgtcaccgtgaccgatgaaaacaccggtgagatctcggagaaagtgaaactgggcaccaaagccttggctggccaatggctggcatacggcgttactcgctccgtgaccaagcgttcggtgatgacccttgcttacggcagcaaagagtttggtttccgccaacaggttctggaggatactatccaaccggccatcgactctggtaaaggcctgatgttcacgcagccgaatcaggcagcgggctatatggcgaagctgatttgggaatcggttagcgttaccgttgttgcagcggtggaggctatgaactggctgaaatctgcggcgaagctgttagctgcggaggtgaaggacaagaagacgggcgaaatcctgcgtaagcgctgcgcagtgcattgggttacgccggatggttttccggtatggcaggagtacaaaaagcctattcagacccgtctgaacctgatgtttctgggtcaatttcgtctgcagccgacgatcaacaccaataaggactccgagatcgacgcgcacaaacaggagtctggcatcgcacccaatttcgttcactcacaggacggttcccatctgcgtaagaccgtcgtgtgggcacacgagaagtatggcattgagtcgtttgcattgatccacgattcctttggtaccatcccggcggacgctgcgaacctgtttaaagcggttcgcgaaaccatggttgacacctatgaaagttgcgatgttctggcagacttttatgatcagttcgccgaccaactgcatgagtcccagctggataaaatgccggcgttaccggcgaagggcaacttaaatctccgcgacatcctggaatctgatttcgccttcgcgtaa

SEQ ID NO: 157 - DNA, 2646 bp, synthetic construct
  source 1..2646: mol_type = other DNA
atgaatacaattaacatagctaaaaatgatttcagcgatattgaactggctgcgatcccgtttaataccttggcggaccattatggtgagcgtctggcgcgtgagcaacttgctctggagcacgaatcctacgagatgggtgaagcgcgtttccggaagatgttcgagcgccagcttaaggctggcgaggtggcggataacgctgctgcgaagccgttgattacgaccctgctgccgaaaatgattgcgcgtattaacgattggttcgaggaagtgaaagcaaagcgtggtaaacgtccaaccgcattccagtttctgcaagagatcaagccggaggcggtggcatacattacgatcaaaaccactctcgcatgtctcaccagcgcggataatactacggtccaagcggtggccagcgcgattggccgcgcgattgaggacgaagcgcgttttggtcgcattcgtgacctggaagcgaaacattttaagaagaacgttgaagaacaattgaatgtgggccacgtttacaagaaagcgttcatgcaagtcgttgaagctgatatgctgagcaaaggcctgttaggtggtgaagcatggagcagctggcataaggaggactcaattcacgtcggcgtgcggtgcattgaaatgctgatcgaatcgaccggtatggttagcctgcatcgccaaaacgccggcgtggtgggtcaagatagcgaaacgattgaactggcgccagagtacgcggaagctatcgctaccagagccggcgcattggcggggatcagcccgatgttccagccgtgtgttgtaccaccgaagccgtggaccggtatcaccggtggaggttactgggcgaatggtagacgtccgttggcgttggttcgtacccatagcaaaaaggctctgatgcgttatgaagacgtttacatgccggaagtgtacaaagccatcaacatcgcgcagaacactgcgtggaaaatcaacaaaaaggtgttagctgtggcgaacgtaattacaaaatggaagcactgcccggttgaggacatcccggctattgaacgtgaagagctgccaatgaaaccagaggacattgacatgaatccggaggcgctgaccgcatggaaacgtgcggcagcagcggtcgcccgtaaggataaagccagaaagagccgtcgtatctccctggaattcatgcttgagcaggcgaacaaattcgctaaccacaaagccatctggtttccgtataatatggattggcgtggtcgtgtttacgcggtatcgatgttcaacccgcagggtaatgacatgaccaagggtttgttgaccttggccaaaggtaaaccgattggcaaagaaggttactattggttgaagatccacggtgcgaactgcgcaggggtggataaggtaccgttcccggaacgtattaaattcatcgaggaaaaccacgaaaacattatggcgtgcgcaaagagcccgctggaaaacacgtggtgggcagagcaggacagtccattctgcttcttggcgttctgtttcgaatatgcaggtgtccagcaccacggcctgagctataactgcagcctgccgctggcctttgatggttcttgtagcggtattcaacactttagcgccatgctgcgcgatgaggttggtggcagagcagtgaatctgctgccaagcgaaaccgtgcaagatatctatggcattgtggctaagaaggttaatgaaatcctgcaagcagacgcgattaacggcacggacaacgaggttgtcaccgtgaccgatgaaaacaccggtgagatctcggagaaagtgaaactgggcaccaaagccttggctggccaatggctggcatacggcgttactcgctccgtgaccaagcgttcggtgatgacccttgcttacggcagcaaagagtttggtttccgccaacaggttctggaggatactatccaaccggccatcgactctggtaaaggcctgatgttcacgcagccgaatcaggcagcgggctatatggcgaagctgatttgggaatcggttagcgttaccgttgttgcagcggtggaggctatgaactggctgaaatctgcggcgaagctgttagctgcggaggtgaaggacaagaagacgggcgaaatcctgcgtaagcgctgcgcagtgcattgggttacgccggatggttttccggtatggcaggagtacaaaaagcctattcagacccgtctgaacctgatgtttctgggtcaatttcgtctgcagccgacgatcaacaccaataaggactccgagatcgacgcgcacaaacaggagtctggcatcgcacccaatttcgttcactcacaggacggttcccatctgcgtaagaccgtcgtgtgggcacacgagaagtatggcattgagtcgtttgcattgatccacgattcctttggtaccatcccggcggacgctgcgaacctgtttaaagcggttcgcgaaaccatggttgacacctatgaaagttgcgatgttctggcagacttttatgatcagttcgccgaccaactgcatgagtcccagctggataaaatgccggcgttaccggcgaagggcaacttaaatctccgcgacatcctggaatctgattacgccttcgcgtaa

SEQ ID NO: 158 - DNA, 2646 bp, synthetic construct
  source 1..2646: mol_type = other DNA
atgaatacaattaacatagctaaaaatgatttcagcgatattgaactggctgcgatcccgtttaataccttggcggaccattatggtgagcgtctggcgcgtgagcaacttgctctggagcacgaatcctacgagatgggtgaagcgcgtttccggaagatgttcgagcgccagcttaaggctggcgaggtggcggataacgctgctgcgaagccgttgattacgaccctgctgccgaaaatgattgcgcgtattaacgattggttcgaggaagtgaaagcaaagcgtggtaaacgtccaaccgcattccagtttctgcaagagatcaagccggaggcggtggcatacattacgatcaaaaccactctcgcatgtctcaccagcgcggataatactacggtccaagcggtggccagcgcgattggccgcgcgattgaggacgaagcgcgttttggtcgcattcgtgacctggaagcgaaacattttaagaagaacgttgaagaacaattgaatgtgggccacgtttacaagaaagcgttcatgcaagtcgttgaagctgatatgctgagcaaaggcctgttaggtggtgaagcatggagcagctggcataaggaggactcaattcacgtcggcgtgcggtgcattgaaatgctgatcgaatcgaccggtatggttagcctgcatcgccaaaacgccggcgtggtgggtcaagatagcgaaacgattgaactggcgccagagtacgcggaagctatcgctaccagagccggcgcattggcggggatcagcccgatgttccagccgtgtgttgtaccaccgaagccgtggaccggtatcaccggtggaggttactgggcgaatggtagacgtccgttggcgttggttcgtacccatagcaaaaaggctctgatgcgttatgaagacgtttacatgccggaagtgtacaaagccatcaacatcgcgcagaacactgcgtggaaaatcaacaaaaaggtgttagctgtggcgaacgtaattacaaaatggaagcactgcccggttgaggacatcccggctattgaacgtgaagagctgccaatgaaaccagaggacattgacatgaatccggaggcgctgaccgcatggaaacgtgcggcagcagcggtctatcgtaagggtaaagccagaaagagccgtcgtatctccctggaattcatgcttgagcaggcgaacaaattcgctaaccacaaagccatctggtttccgtataatatggattggcgtggtcgtgtttacgcggtatcgatgttcaacccgcagggtaatgacatgaccaagggtttgttgaccttggccaaaggtaaaccgattggcaaagaaggttactattggttgaagatccacggtgcgaactgcgcaggggtggataaggtaccgttcccggaacgtattaaattcatcgaggaaaaccacgaaaacattatggcgtgcgcaaagagcccgctggaaaacacgtggtgggcagagcaggacagtccattctgcttcttggcgttctgtttcgaatatgcaggtgtccagcaccacggcctgagctataactgcagcctgccgctggcctttgatggttcttgtagcggtattcaacactttagcgccatgctgcgcgatgaggttggtggcagagcagtgaatctgctgccaagcgaaaccgtgcaagatatctatggcattgtggctaagaaggttaatgaaatcctgcaagcagacgcgattaacggcacggacaacgaggttgtcaccgtgaccgatgaaaacaccggtgagatctcggagaaagtgaaactgggcaccaaagccttggctggccaatggctggcatacggcgttactcgctccgtgaccaagcgttcggtgatgacccttgcttacggcagcaaagagtttggtttccgccaacaggttctggaggatactatccaaccggccatcgactctggtaaaggcctgatgttcacgcagccgaatcaggcagcgggctatatggcgaagctgatttgggaatcggttagcgttaccgttgttgcagcggtggaggctatgaactggctgaaatctgcggcgaagctgttagctgcggaggtgaaggacaagaagacgggcgaaatcctgcgtaagcgctgcgcagtgcattgggttacgccggatggttttccggtatggcaggagtacaaaaagcctattcagacccgtctgaacctgatgtttctgggtcaatttcgtctgcagccgacgatcaacaccaataaggactccgagatcgacgcgcacaaacaggagtctggcatcgcacccaatttcgttcactcacaggacggttcccatctgcgtaagaccgtcgtgtgggcacacgagaagtatggcattgagtcgtttgcattgatccacgattcctttggtaccatcccggcggacgctgcgaacctgtttaaagcggttcgcgaaaccatggttgacacctatgaaagttgcgatgttctggcagacttttatgatcagttcgccgaccaactgcatgagtcccagctggataaaatgccggcgttaccggcgaagggcaacttaaatctccgcgacatcctggaatctgattacgccttcgcgtaa

SEQ ID NO: 159 - DNA, 2652 bp, synthetic construct
  source 1..2652: mol_type = other DNA
atgaatacaattaacatagctaaaaatgatttcagcgatattgaactggctgcgatcccgtttaataccttggcggaccattatggtgagcgtctggcgcgtgagcaacttgctctggagcacgaatcctacgagatgggtgaagcgcgtttccggaagatgttcgagcgccagcttaaggctggcgaggtggcggataacgctgctgcgaagccgttgattacgaccctgctgccgaaaatgattgcgcgtattaacgattggttcgaggaagtgaaagcaaagcgtggtaaacgtccaaccgcattccagtttctgcaagagatcaagccggaggcggtggcatacattacgatcaaaaccactctcgcatgtctcaccagcgcggataatactacggtccaagcggtggccagcgcgattggccgcgcgattgaggacgaagcgcgttttggtcgcattcgtgacctggaagcgaaacattttaagaagaacgttgaagaacaattgaataaacgcgtgggccacgttcacaagaaagcgttcatgcaagtcgttgaagctgatatgctgagcaaaggcctgttaggtggtgaagcatggagcagctggcataaggaggactcaattcacgtcggcgtgcggtgcattgaaatgctgatcgaatcgaccggtatggttagcctgcatcgccaaaacgccggcgtggtgggtcaagatagcgaaacgattgaactggcgccagagtacgcggaagctatcgctaccagagccggcgcattggcggggatcagcccgatgttccagccgtgtgttgtaccaccgaagccgtggaccggtatcaccggtggaggttactgggcgaatggtagacgtccgttggcgttggttcgtacccatagcaaaaaggctctgatgcgttatgaagacgtttacatgccggaagtgtacaaagccatcaacatcgcgcagaacactgcgtggaaaatcaacaaaaaggtgttagctgtggcgaacgtaattacaaaatggaagcactgcccggttgaggacatcccggctattgaacgtgaagagctgccaatgaaaccagaggacattgacatgaatccggaggcgctgaccgcatggaaacgtgcggcagcagcggtctatcgtaaggataaagccagaaagagccgtcgtatctccctggaattcatgcttgagcaggcgaacaaattcgctaaccacaaagccatctggtttccgtataatatggattggcgtggtcgtgtttacgcggtatcgatgttcaacccgcagggtaatgacatgaccaagggtttgttgaccttggccaaaggtaaaccgattggcaaagaaggttactattggttgaagatccacggtgcgaactgcgcaggggtggataaggtaccgttcccggaacgtattaaattcatcgaggaaaaccacgaaaacattatggcgtgcgcaaagagcccgctggaaaacacgtggtgggcagagcaggacagtccattctgcttcttggcgttctgtttcgaatatgcaggtgtccagcaccacggcctgagctataactgcagcctgccgctggcctttgatggttcttgtagcggtattcaacactttagcgccatgctgcgcgatgaggttggtggcagagcagtgaatctgctgccaagcgaaaccgtgcaagatatctatggcattgtggctaagaaggttaatgaaatcctgcaagcagacgcgattaacggcacggacaacgaggttgtcaccgtgaccgatgaaaacaccggtgagatctcggagaaagtgaaactgggcaccaaagccttggctggccaatggctggcatacggcgttactcgctccgtgaccaagcgttcggtgatgacccttgcttacggcagcaaagagtttggtttccgccaacaggttctggaggatactatccaaccggccatcgactctggtaaaggcctgatgttcacgcagccgaatcaggcagcgggctatatggcgaagctgatttgggaatcggttagcgttaccgttgttgcagcggtggaggctatgaactggctgaaatctgcggcgaagctgttagctgcggaggtgaaggacaagaagacgggcgaaatcctgcgtaagcgctgcgcagtgcattgggttacgccggatggttttccggtatggcaggagtacaaaaagcctattcagacccgtctgaacctgatgtttctgggtcaatttcgtctgcagccgacgatcaacaccaataaggactccgagatcgacgcgcacaaacaggagtctggcatcgcacccaatttcgttcactcacaggacggttcccatctgcgtaagaccgtcgtgtgggcacacgagaagtatggcattgagtcgtttgcattgatccacgattcctttggtaccatcccggcggacgctgcgaacctgtttaaagcggttcgcgaaaccatggttgacacctatgaaagttgcgatgttctggcagacttttatgatcagttcgccgaccaactgcatgagtcccagctggataaaatgccggcgttaccggcgaagggcaacttaaatctccgcgacatcctggaatctgatttcgccttcgcgtaa

SEQ ID NO: 160 - DNA, 2652 bp, synthetic construct
  source 1..2652: mol_type = other DNA
atgaatacaattaacatagctaaaaatgatttcagcgatattgaactggctgcgatcccgtttaataccttggcggaccattatggtgagcgtctggcgcgtgagcaacttgctctggagcacgaatcctacgagatgggtgaagcgcgtttccggaagatgttcgagcgccagcttaaggctggcgaggtggcggataacgctgctgcgaagccgttgattacgaccctgctgccgaaaatgattgcgcgtattaacgattggttcgaggaagtgaaagcaaagcgtggtaaacgtccaaccgcattccagtttctgcaagagatcaagccggaggcggtggcatacattacgatcaaaaccactctcgcatgtctcaccagcgcggataatactacggtccaagcggtggccagcgcgattggccgcgcgattgaggacgaagcgcgttttggtcgcattcgtgacctggaagcgaaacattttaagaagaacgttgaagaacaattgaataaacgcgtgggccacgtttacaagaaagcgttcatgcaagtcgttgaagctgatatgctgagcaaaggcctgttaggtggtgaagcatggagcagctggcataaggaggactcaattcacgtcggcgtgcggtgcattgaaatgctgatcgaatcgaccggtatggttagcctgcatcgccaaaacgccggcgtggtgggtcaagatagcgaaacgattgaactggcgccagagtacgcggaagctatcgctaccagagccggcgcattggcggggatcagcccgatgttccagccgtgtgttgtaccaccgaagccgtggaccggtatcaccggtggaggttactgggcgaatggtagacgtccgttggcgttggttcgtacccatagcaaaaaggctctgatgcgttatgaagacgtttacatgccggaagtgtacaaagccatcaacatcgcgcagaacactgcgtggaaaatcaacaaaaaggtgttagctgtggcgaacgtaattacaaaatggaagcactgcccggttgaggacatcccggctattgaacgtgaagagctgccaatgaaaccagaggacattgacatgaatccggaggcgctgaccgcatggaaacgtgcggcagcagcggtcgcccgtaaggataaagccagaaagagccgtcgtatctccctggaattcatgcttgagcaggcgaacaaattcgctaaccacaaagccatctggtttccgtataatatggattggcgtggtcgtgtttacgcggtatcgatgttcaacccgcagggtaatgacatgaccaagggtttgttgaccttggccaaaggtaaaccgattggcaaagaaggttactattggttgaagatccacggtgcgaactgcgcaggggtggataaggtaccgttcccggaacgtattaaattcatcgaggaaaaccacgaaaacattatggcgtgcgcaaagagcccgctggaaaacacgtggtgggcagagcaggacagtccattctgcttcttggcgttctgtttcgaatatgcaggtgtccagcaccacggcctgagctataactgcagcctgccgctggcctttgatggttcttgtagcggtattcaacactttagcgccatgctgcgcgatgaggttggtggcagagcagtgaatctgctgccaagcgaaaccgtgcaagatatctatggcattgtggctaagaaggttaatgaaatcctgcaagcagacgcgattaacggcacggacaacgaggttgtcaccgtgaccgatgaaaacaccggtgagatctcggagaaagtgaaactgggcaccaaagccttggctggccaatggctggcatacggcgttactcgctccgtgaccaagcgttcggtgatgacccttgcttacggcagcaaagagtttggtttccgccaacaggttctggaggatactatccaaccggccatcgactctggtaaaggcctgatgttcacgcagccgaatcaggcagcgggctatatggcgaagctgatttgggaatcggttagcgttaccgttgttgcagcggtggaggctatgaactggctgaaatctgcggcgaagctgttagctgcggaggtgaaggacaagaagacgggcgaaatcctgcgtaagcgctgcgcagtgcattgggttacgccggatggttttccggtatggcaggagtacaaaaagcctattcagacccgtctgaacctgatgtttctgggtcaatttcgtctgcagccgacgatcaacaccaataaggactccgagatcgacgcgcacaaacaggagtctggcatcgcacccaatttcgttcactcacaggacggttcccatctgcgtaagaccgtcgtgtgggcacacgagaagtatggcattgagtcgtttgcattgatccacgattcctttggtaccatcccggcggacgctgcgaacctgtttaaagcggttcgcgaaaccatggttgacacctatgaaagttgcgatgttctggcagacttttatgatcagttcgccgaccaactgcatgagtcccagctggataaaatgccggcgttaccggcgaagggcaacttaaatctccgcgacatcctggaatctgatttcgccttcgcgtaa

SEQ ID NO: 161 - DNA, 2652 bp, synthetic construct
  source 1..2652: mol_type = other DNA
atgaatacaattaacatagctaaaaatgatttcagcgatattgaactggctgcgatcccgtttaataccttggcggaccattatggtgagcgtctggcgcgtgagcaacttgctctggagcacgaatcctacgagatgggtgaagcgcgtttccggaagatgttcgagcgccagcttaaggctggcgaggtggcggataacgctgctgcgaagccgttgattacgaccctgctgccgaaaatgattgcgcgtattaacgattggttcgaggaagtgaaagcaaagcgtggtaaacgtccaaccgcattccagtttctgcaagagatcaagccggaggcggtggcatacattacgatcaaaaccactctcgcatgtctcaccagcgcggataatactacggtccaagcggtggccagcgcgattggccgcgcgattgaggacgaagcgcgttttggtcgcattcgtgacctggaagcgaaacattttaagaagaacgttgaagaacaattgaataaacgcgtgggccacgtttacaagaaagcgttcatgcaagtcgttgaagctgatatgctgagcaaaggcctgttaggtggtgaagcatggagcagctggcataaggaggactcaattcacgtcggcgtgcggtgcattgaaatgctgatcgaatcgaccggtatggttagcctgcatcgccaaaacgccggcgtggtgggtcaagatagcgaaacgattgaactggcgccagagtacgcggaagctatcgctaccagagccggcgcattggcggggatcagcccgatgttccagccgtgtgttgtaccaccgaagccgtggaccggtatcaccggtggaggttactgggcgaatggtagacgtccgttggcgttggttcgtacccatagcaaaaaggctctgatgcgttatgaagacgtttacatgccggaagtgtacaaagccatcaacatcgcgcagaacactgcgtggaaaatcaacaaaaaggtgttagctgtggcgaacgtaattacaaaatggaagcactgcccggttgaggacatcccggctattgaacgtgaagagctgccaatgaaaccagaggacattgacatgaatccggaggcgctgaccgcatggaaacgtgcggcagcagcggtcgatcgtaaggataaagccagaaagagccgtcgtatctccctggaattcatgcttgagcaggcgaacaaattcgctaaccacaaagccatctggtttccgtataatatggattggcgtggtcgtgtttacgcggtatcgatgttcaacccgcagggtaatgacatgaccaagggtttgttgaccttggccaaaggtaaaccgattggcaaagaaggttactattggttgaagatccacggtgcgaactgcgcaggggtggataaggtaccgttcccggaacgtattaaattcatcgaggaaaaccacgaaaacattatggcgtgcgcaaagagcccgctggaaaacacgtggtgggcagagcaggacagtccattctgcttcttggcgttctgtttcgaatatgcaggtgtccagcaccacggcctgagctataactgcagcctgccgctggcctttgatggttcttgtagcggtattcaacactttagcgccatgctgcgcgatgaggttggtggcagagcagtgaatctgctgccaagcgaaaccgtgcaagatatctatggcattgtggctaagaaggttaatgaaatcctgcaagcagacgcgattaacggcacggacaacgaggttgtcaccgtgaccgatgaaaacaccggtgagatctcggagaaagtgaaactgggcaccaaagccttggctggccaatggctggcatacggcgttactcgctccgtgaccaagcgttcggtgatgacccttgcttacggcagcaaagagtttggtttccgccaacaggttctggaggatactatccaaccggccatcgactctggtaaaggcctgatgttcacgcagccgaatcaggcagcgggctatatggcgaagctgatttgggaatcggttagcgttaccgttgttgcagcggtggaggctatgaactggctgaaatctgcggcgaagctgttagctgcggaggtgaaggacaagaagacgggcgaaatcctgcgtaagcgctgcgcagtgcattgggttacgccggatggttttccggtatggcaggagtacaaaaagcctattcagacccgtctgaacctgatgtttctgggtcaatttcgtctgcagccgacgatcaacaccaataaggactccgagatcgacgcgcacaaacaggagtctggcatcgcacccaatttcgttcactcacaggacggttcccatctgcgtaagaccgtcgtgtgggcacacgagaagtatggcattgagtcgtttgcattgatccacgattcctttggtaccatcccggcggacgctgcgaacctgtttaaagcggttcgcgaaaccatggttgacacctatgaaagttgcgatgttctggcagacttttatgatcagttcgccgaccaactgcatgagtcccagctggataaaatgccggcgttaccggcgaagggcaacttaaatctccgcgacatcctggaatctgatttcgccttcgcgtaa

SEQ ID NO: 162 - DNA, 2652 bp, synthetic construct
  source 1..2652: mol_type = other DNA
atgaatacaattaacatagctaaaaatgatttcagcgatattgaactggctgcgatcccgtttaataccttggcggaccattatggtgagcgtctggcgcgtgagcaacttgctctggagcacgaatcctacgagatgggtgaagcgcgtttccggaagatgttcgagcgccagcttaaggctggcgaggtggcggataacgctgctgcgaagccgttgattacgaccctgctgccgaaaatgattgcgcgtattaacgattggttcgaggaagtgaaagcaaagcgtggtaaacgtccaaccgcattccagtttctgcaagagatcaagccggaggcggtggcatacattacgatcaaaaccactctcgcatgtctcaccagcgcggataatactacggtccaagcggtggccagcgcgattggccgcgcgattgaggacgaagcgcgttttggtcgcattcgtgacctggaagcgaaacattttaagaagaacgttgaagaacaattgaataaacgcgtgggccacgtttacaagaaagcgttcatgcaagtcgttgaagctgatatgctgagcaaaggcctgttaggtggtgaagcatggagcagctggcataaggaggactcaattcacgtcggcgtgcggtgcattgaaatgctgatcgaatcgaccggtatggttagcctgcatcgccaaaacgccggcgtggtgggtcaagatagcgaaacgattgaactggcgccagagtacgcggaagctatcgctaccagagccggcgcattggcggggatcagcccgatgttccagccgtgtgttgtaccaccgaagccgtggaccggtatcaccggtggaggttactgggcgaatggtagacgtccgttggcgttggttcgtacccatagcaaaaaggctctgatgcgttatgaagacgtttacatgccggaagtgtacaaagccatcaacatcgcgcagaacactgcgtggaaaatcaacaaaaaggtgttagctgtggcgaacgtaattacaaaatggaagcactgcccggttgaggacatcccggctattgaacgtgaagagctgccaatgaaaccagaggacattgacatgaatccggaggcgctgaccgcatggaaacgtgcggcagcagcggtctatcgtaaggataaagccagaaagagccgtcgtatctccctggaattcatgcttgagcaggcgaacaaattcgctaaccacaaagccatctggtttccgtataatatggattggcgtggtcgtgtttacgcggtatcgatgttcaacccgcagggtaatgacatgaccaagggtttgttgaccttggccaaaggtaaaccgattggcaaagaaggttactattggttgaagatccacggtgcgaactgcgcaggggtggataaggtaccgttcccggaacgtattaaattcatcgaggaaaaccacgaaaacattatggcgtgcgcaaagagcccgctggaaaacacgtggtgggcagagcaggacagtccattctgcttcttggcgttctgtttcgaatatgcaggtgtccagcaccacggcctgagctataactgcagcctgccgctggcctttgatggttcttgtagcggtattcaacactttagcgccatgctgcgcgatgaggttggtggcagagcagtgaatctgctgccaagcgaaaccgtgcaagatatctatggcattgtggctaagaaggttaatgaaatcctgcaagcagacgcgattaacggcacggacaacgaggttgtcaccgtgaccgatgaaaacaccggtgagatctcggagaaagtgaaactgggcaccaaagccttggctggccaatggctggcatacggcgttactcgctccgtgaccaagcgttcggtgatgacccttgcttacggcagcaaagagtttggtttccgccaacaggttctggaggatactatccaaccggccatcgactctggtaaaggcctgatgttcacgcagccgaatcaggcagcgggctatatggcgaagctgatttgggaatcggttagcgttaccgttgttgcagcggtggaggctatgaactggctgaaatctgcggcgaagctgttagctgcggaggtgaaggacaagaagacgggcgaaatcctgcgtaagcgctgcgcagtgcattgggttacgccggatggttttccggtatggcaggagtacaaaaagcctattcagacccgtctgaacctgatgtttctgggtcaatttcgtctgcagccgacgatcaacaccaataaggactccgagatcgacgcgcacaaacaggagtctggcatcgcacccaatttcgttcactcacaggacggttcccatctgcgtaagaccgtcgtgtgggcacacgagaagtatggcattgagtcgtttgcattgatccacgattcctttggtaccatcccggcggacgctgcgaacctgtttaaagcggttcgcgaaaccatggttgacacctatgaaagttgcgatgttctggcagacttttatgatcagttcgccgaccaactgcatgagtcccagctggataaaatgccggcgttaccggcgaagggcaacttaaatctccgcgacatcctggaatctgatgccgccttcgcgtaa

SEQ ID NO: 163 - DNA, 2652 bp, synthetic construct
  source 1..2652: mol_type = other DNA
atgaatacaattaacatagctaaaaatgatttcagcgatattgaactggctgcgatcccgtttaataccttggcggaccattatggtgagcgtctggcgcgtgagcaacttgctctggagcacgaatcctacgagatgggtgaagcgcgtttccggaagatgttcgagcgccagcttaaggctggcgaggtggcggataacgctgctgcgaagccgttgattacgaccctgctgccgaaaatgattgcgcgtattaacgattggttcgaggaagtgaaagcaaagcgtggtaaacgtccaaccgcattccagtttctgcaagagatcaagccggaggcggtggcatacattacgatcaaaaccactctcgcatgtctcaccagcgcggataatactacggtccaagcggtggccagcgcgattggccgcgcgattgaggacgaagcgcgttttggtcgcattcgtgacctggaagcgaaacattttaagaagaacgttgaagaacaattgaataaacgcgtgggccacgtttacaagaaagcgttcatgcaagtcgttgaagctgatatgctgagcaaaggcctgttaggtggtgaagcatggagcagctggcataaggaggactcaattcacgtcggcgtgcggtgcattgaaatgctgatcgaatcgaccggtatggttagcctgcatcgccaaaacgccggcgtggtgggtcaagatagcgaaacgattgaactggcgccagagtacgcggaagctatcgctaccagagccggcgcattggcggggatcagcccgatgttccagccgtgtgttgtaccaccgaagccgtggaccggtatcaccggtggaggttactgggcgaatggtagacgtccgttggcgttggttcgtacccatagcaaaaaggctctgatgcgttatgaagacgtttacatgccggaagtgtacaaagccatcaacatcgcgcagaacactgcgtggaaaatcaacaaaaaggtgttagctgtggcgaacgtaattacaaaatggaagcactgcccggttgaggacatcccggctattgaacgtgaagagctgccaatgaaaccagaggacattgacatgaatccggaggcgctgaccgcatggaaacgtgcggcagcagcggtctatcgtaaggataaagccagaaagagccgtcgtatctccctggaattcatgcttgagcaggcgaacaaattcgctaaccacaaagccatctggtttccgtataatatggattggcgtggtcgtgtttacgcggtatcgatgttcaacccgcagggtaatgacatgaccaagggtttgttgaccttggccaaaggtaaaccgattggcaaagaaggttactattggttgaagatccacggtgcgaactgcgcaggggtggataaggtaccgttcccggaacgtattaaattcatcgaggaaaaccacgaaaacattatggcgtgcgcaaagagcccgctggaaaacacgtggtgggcagagcaggacagtccattctgcttcttggcgttctgtttcgaatatgcaggtgtccagcaccacggcctgagctataactgcagcctgccgctggcctttgatggttcttgtagcggtattcaacactttagcgccatgctgcgcgatgaggttggtggcagagcagtgaatctgctgccaagcgaaaccgtgcaagatatctatggcattgtggctaagaaggttaatgaaatcctgcaagcagacgcgattaacggcacggacaacgaggttgtcaccgtgaccgatgaaaacaccggtgagatctcggagaaagtgaaactgggcaccaaagccttggctggccaatggctggcatacggcgttactcgctccgtgaccaagcgttcggtgatgacccttgcttacggcagcaaagagtttggtttccgccaacaggttctggaggatactatccaaccggccatcgactctggtaaaggcctgatgttcacgcagccgaatcaggcagcgggctatatggcgaagctgatttgggaatcggttagcgttaccgttgttgcagcggtggaggctatgaactggctgaaatctgcggcgaagctgttagctgcggaggtgaaggacaagaagacgggcgaaatcctgcgtaagcgctgcgcagtgcattgggttacgccggatggttttccggtatggcaggagtacaaaaagcctattcagacccgtctgaacctgatgtttctgggtcaatttcgtctgcagccgacgatcaacaccaataaggactccgagatcgacgcgcacaaacaggagtctggcatcgcacccaatttcgttcactcacaggacggttcccatctgcgtaagaccgtcgtgtgggcacacgagaagtatggcattgagtcgtttgcattgatccacgattcctttggtaccatcccggcggacgctgcgaacctgtttaaagcggttcgcgaaaccatggttgacacctatgaaagttgcgatgttctggcagacttttatgatcagttcgccgaccaactgcatgagtcccagctggataaaatgccggcgttaccggcgaagggcaacttaaatctccgcgacatcctggaatctgatggcgccttcgcgtaa

SEQ ID NO: 164 - DNA, 2652 bp, synthetic construct
  source 1..2652: mol_type = other DNA
atgaatacaattaacatagctaaaaatgatttcagcgatattgaactggctgcgatcccgtttaataccttggcggaccattatggtgagcgtctggcgcgtgagcaacttgctctggagcacgaatcctacgagatgggtgaagcgcgtttccggaagatgttcgagcgccagcttaaggctggcgaggtggcggataacgctgctgcgaagccgttgattacgaccctgctgccgaaaatgattgcgcgtattaacgattggttcgaggaagtgaaagcaaagcgtggtaaacgtccaaccgcattccagtttctgcaagagatcaagccggaggcggtggcatacattacgatcaaaaccactctcgcatgtctcaccagcgcggataatactacggtccaagcggtggccagcgcgattggccgcgcgattgaggacgaagcgcgttttggtcgcattcgtgacctggaagcgaaacattttaagaagaacgttgaagaacaattgaataaacgcgtgggccacgtttacaagaaagcgttcatgcaagtcgttgaagctgatatgctgagcaaaggcctgttaggtggtgaagcatggagcagctggcataaggaggactcaattcacgtcggcgtgcggtgcattgaaatgctgatcgaatcgaccggtatggttagcctgcatcgccaaaacgccggcgtggtgggtcaagatagcgaaacgattgaactggcgccagagtacgcggaagctatcgctaccagagccggcgcattggcggggatcagcccgatgttccagccgtgtgttgtaccaccgaagccgtggaccggtatcaccggtggaggttactgggcgaatggtagacgtccgttggcgttggttcgtacccatagcaaaaaggctctgatgcgttatgaagacgtttacatgccggaagtgtacaaagccatcaacatcgcgcagaacactgcgtggaaaatcaacaaaaaggtgttagctgtggcgaacgtaattacaaaatggaagcactgcccggttgaggacatcccggctattgaacgtgaagagctgccaatgaaaccagaggacattgacatgaatccggaggcgctgaccgcatggaaacgtgcggcagcagcggtctatcgtaaggataaagccagaaagagccgtcgtatctccctggaattcatgcttgagcaggcgaacaaattcgctaaccacaaagccatctggtttccgtataatatggattggcgtggtcgtgtttacgcggtatcgatgttcaacccgcagggtaatgacatgaccaagggtttgttgaccttggccaaaggtaaaccgattggcaaagaaggttactattggttgaagatccacggtgcgaactgcgcaggggtggataaggtaccgttcccggaacgtattaaattcatcgaggaaaaccacgaaaacattatggcgtgcgcaaagagcccgctggaaaacacgtggtgggcagagcaggacagtccattctgcttcttggcgttctgtttcgaatatgcaggtgtccagcaccacggcctgagctataactgcagcctgccgctggcctttgatggttcttgtagcggtattcaacactttagcgccatgctgcgcgatgaggttggtggcagagcagtgaatctgctgccaagcgaaaccgtgcaagatatctatggcattgtggctaagaaggttaatgaaatcctgcaagcagacgcgattaacggcacggacaacgaggttgtcaccgtgaccgatgaaaacaccggtgagatctcggagaaagtgaaactgggcaccaaagccttggctggccaatggctggcatacggcgttactcgctccgtgaccaagcgttcggtgatgacccttgcttacggcagcaaagagtttggtttccgccaacaggttctggaggatactatccaaccggccatcgactctggtaaaggcctgatgttcacgcagccgaatcaggcagcgggctatatggcgaagctgatttgggaatcggttagcgttaccgttgttgcagcggtggaggctatgaactggctgaaatctgcggcgaagctgttagctgcggaggtgaaggacaagaagacgggcgaaatcctgcgtaagcgctgcgcagtgcattgggttacgccggatggttttccggtatggcaggagtacaaaaagcctattcagacccgtctgaacctgatgtttctgggtcaatttcgtctgcagccgacgatcaacaccaataaggactccgagatcgacgcgcacaaacaggagtctggcatcgcacccaatttcgttcactcacaggacggttcccatctgcgtaagaccgtcgtgtgggcacacgagaagtatggcattgagtcgtttgcattgatccacgattcctttggtaccatcccggcggacgctgcgaacctgtttaaagcggttcgcgaaaccatggttgacacctatgaaagttgcgatgttctggcagacttttatgatcagttcgccgaccaactgcatgagtcccagctggataaaatgccggcgttaccggcgaagggcaacttaaatctccgcgacatcctggaatctgattgggccttcgcgtaa

SEQ ID NO: 165 - DNA, 2652 bp, synthetic construct
  source 1..2652: mol_type = other DNA
atgaatacaattaacatagctaaaaatgatttcagcgatattgaactggctgcgatcccgtttaataccttggcggaccattatggtgagcgtctggcgcgtgagcaacttgctctggagcacgaatcctacgagatgggtgaagcgcgtttccggaagatgttcgagcgccagcttaaggctggcgaggtggcggataacgctgctgcgaagccgttgattacgaccctgctgccgaaaatgattgcgcgtattaacgattggttcgaggaagtgaaagcaaagcgtggtaaacgtccaaccgcattccagtttctgcaagagatcaagccggaggcggtggcatacattacgatcaaaaccactctcgcatgtctcaccagcgcggataatactacggtccaagcggtggccagcgcgattggccgcgcgattgaggacgaagcgcgttttggtcgcattcgtgacctggaagcgaaacattttaagaagaacgttgaagaacaattgaataaacgcgtgggccacgtttacaagaaagcgttcatgcaagtcgttgaagctgatatgctgagcaaaggcctgttaggtggtgaagcatggagcagctggcataaggaggactcaattcacgtcggcgtgcggtgcattgaaatgctgatcgaatcgaccggtatggttagcctgcatcgccaaaacgccggcgtggtgggtcaagatagcgaaacgattgaactggcgccagagtacgcggaagctatcgctaccagagccggcgcattggcggggatcagcccgatgttccagccgtgtgttgtaccaccgaagccgtggaccggtatcaccggtggaggttactgggcgaatggtagacgtccgttggcgttggttcgtacccatagcaaaaaggctctgatgcgttatgaagacgtttacatgccggaagtgtacaaagccatcaacatcgcgcagaacactgcgtggaaaatcaacaaaaaggtgttagctgtggcgaacgtaattacaaaatggaagcactgcccggttgaggacatcccggctattgaacgtgaagagctgccaatgaaaccagaggacattgacatgaatccggaggcgctgaccgcatggaaacgtgcggcagcagcggtctatcgtaaggccaaagccagaaagagccgtcgtatctccctggaattcatgcttgagcaggcgaacaaattcgctaaccacaaagccatctggtttccgtataatatggattggcgtggtcgtgtttacgcggtatcgatgttcaacccgcagggtaatgacatgaccaagggtttgttgaccttggccaaaggtaaaccgattggcaaagaaggttactattggttgaagatccacggtgcgaactgcgcaggggtggataaggtaccgttcccggaacgtattaaattcatcgaggaaaaccacgaaaacattatggcgtgcgcaaagagcccgctggaaaacacgtggtgggcagagcaggacagtccattctgcttcttggcgttctgtttcgaatatgcaggtgtccagcaccacggcctgagctataactgcagcctgccgctggcctttgatggttcttgtagcggtattcaacactttagcgccatgctgcgcgatgaggttggtggcagagcagtgaatctgctgccaagcgaaaccgtgcaagatatctatggcattgtggctaagaaggttaatgaaatcctgcaagcagacgcgattaacggcacggacaacgaggttgtcaccgtgaccgatgaaaacaccggtgagatctcggagaaagtgaaactgggcaccaaagccttggctggccaatggctggcatacggcgttactcgctccgtgaccaagcgttcggtgatgacccttgcttacggcagcaaagagtttggtttccgccaacaggttctggaggatactatccaaccggccatcgactctggtaaaggcctgatgttcacgcagccgaatcaggcagcgggctatatggcgaagctgatttgggaatcggttagcgttaccgttgttgcagcggtggaggctatgaactggctgaaatctgcggcgaagctgttagctgcggaggtgaaggacaagaagacgggcgaaatcctgcgtaagcgctgcgcagtgcattgggttacgccggatggttttccggtatggcaggagtacaaaaagcctattcagacccgtctgaacctgatgtttctgggtcaatttcgtctgcagccgacgatcaacaccaataaggactccgagatcgacgcgcacaaacaggagtctggcatcgcacccaatttcgttcactcacaggacggttcccatctgcgtaagaccgtcgtgtgggcacacgagaagtatggcattgagtcgtttgcattgatccacgattcctttggtaccatcccggcggacgctgcgaacctgtttaaagcggttcgcgaaaccatggttgacacctatgaaagttgcgatgttctggcagacttttatgatcagttcgccgaccaactgcatgagtcccagctggataaaatgccggcgttaccggcgaagggcaacttaaatctccgcgacatcctggaatctgatttcgccttcgcgtaa

SEQ ID NO: 166 - DNA, 2652 bp, synthetic construct
  source 1..2652: mol_type = other DNA
atgaatacaattaacatagctaaaaatgatttcagcgatattgaactggctgcgatcccgtttaataccttggcggaccattatggtgagcgtctggcgcgtgagcaacttgctctggagcacgaatcctacgagatgggtgaagcgcgtttccggaagatgttcgagcgccagcttaaggctggcgaggtggcggataacgctgctgcgaagccgttgattacgaccctgctgccgaaaatgattgcgcgtattaacgattggttcgaggaagtgaaagcaaagcgtggtaaacgtccaaccgcattccagtttctgcaagagatcaagccggaggcggtggcatacattacgatcaaaaccactctcgcatgtctcaccagcgcggataatactacggtccaagcggtggccagcgcgattggccgcgcgattgaggacgaagcgcgttttggtcgcattcgtgacctggaagcgaaacattttaagaagaacgttgaagaacaattgaataaacgcgtgggccacgtttacaagaaagcgttcatgcaagtcgttgaagctgatatgctgagcaaaggcctgttaggtggtgaagcatggagcagctggcataaggaggactcaattcacgtcggcgtgcggtgcattgaaatgctgatcgaatcgaccggtatggttagcctgcatcgccaaaacgccggcgtggtgggtcaagatagcgaaacgattgaactggcgccagagtacgcggaagctatcgctaccagagccggcgcattggcggggatcagcccgatgttccagccgtgtgttgtaccaccgaagccgtggaccggtatcaccggtggaggttactgggcgaatggtagacgtccgttggcgttggttcgtacccatagcaaaaaggctctgatgcgttatgaagacgtttacatgccggaagtgtacaaagccatcaacatcgcgcagaacactgcgtggaaaatcaacaaaaaggtgttagctgtggcgaacgtaattacaaaatggaagcactgcccggttgaggacatcccggctattgaacgtgaagagctgccaatgaaaccagaggacattgacatgaatccggaggcgctgaccgcatggaaacgtgcggcagcagcggtctatcgtaagggtaaagccagaaagagccgtcgtatctccctggaattcatgcttgagcaggcgaacaaattcgctaaccacaaagccatctggtttccgtataatatggattggcgtggtcgtgtttacgcggtatcgatgttcaacccgcagggtaatgacatgaccaagggtttgttgaccttggccaaaggtaaaccgattggcaaagaaggttactattggttgaagatccacggtgcgaactgcgcaggggtggataaggtaccgttcccggaacgtattaaattcatcgaggaaaaccacgaaaacattatggcgtgcgcaaagagcccgctggaaaacacgtggtgggcagagcaggacagtccattctgcttcttggcgttctgtttcgaatatgcaggtgtccagcaccacggcctgagctataactgcagcctgccgctggcctttgatggttcttgtagcggtattcaacactttagcgccatgctgcgcgatgaggttggtggcagagcagtgaatctgctgccaagcgaaaccgtgcaagatatctatggcattgtggctaagaaggttaatgaaatcctgcaagcagacgcgattaacggcacggacaacgaggttgtcaccgtgaccgatgaaaacaccggtgagatctcggagaaagtgaaactgggcaccaaagccttggctggccaatggctggcatacggcgttactcgctccgtgaccaagcgttcggtgatgacccttgcttacggcagcaaagagtttggtttccgccaacaggttctggaggatactatccaaccggccatcgactctggtaaaggcctgatgttcacgcagccgaatcaggcagcgggctatatggcgaagctgatttgggaatcggttagcgttaccgttgttgcagcggtggaggctatgaactggctgaaatctgcggcgaagctgttagctgcggaggtgaaggacaagaagacgggcgaaatcctgcgtaagcgctgcgcagtgcattgggttacgccggatggttttccggtatggcaggagtacaaaaagcctattcagacccgtctgaacctgatgtttctgggtcaatttcgtctgcagccgacgatcaacaccaataaggactccgagatcgacgcgcacaaacaggagtctggcatcgcacccaatttcgttcactcacaggacggttcccatctgcgtaagaccgtcgtgtgggcacacgagaagtatggcattgagtcgtttgcattgatccacgattcctttggtaccatcccggcggacgctgcgaacctgtttaaagcggttcgcgaaaccatggttgacacctatgaaagttgcgatgttctggcagacttttatgatcagttcgccgaccaactgcatgagtcccagctggataaaatgccggcgttaccggcgaagggcaacttaaatctccgcgacatcctggaatctgatttcgccttcgcgtaa

SEQ ID NO: 167 - DNA, 2652 bp, synthetic construct
  source 1..2652: mol_type = other DNA
atgaatacaattaacatagctaaaaatgatttcagcgatattgaactggctgcgatcccgtttaataccttggcggaccattatggtgagcgtctggcgcgtgagcaacttgctctggagcacgaatcctacgagatgggtgaagcgcgtttccggaagatgttcgagcgccagcttaaggctggcgaggtggcggataacgctgctgcgaagccgttgattacgaccctgctgccgaaaatgattgcgcgtattaacgattggttcgaggaagtgaaagcaaagcgtggtaaacgtccaaccgcattccagtttctgcaagagatcaagccggaggcggtggcatacattacgatcaaaaccactctcgcatgtctcaccagcgcggataatactacggtccaagcggtggccagcgcgattggccgcgcgattgaggacgaagcgcgttttggtcgcattcgtgacctggaagcgaaacattttaagaagaacgttgaagaacaattgggtaaacgcgtgggccacgtttacaagaaagcgttcatgcaagtcgttgaagctgatatgctgagcaaaggcctgttaggtggtgaagcatggagcagctggcataaggaggactcaattcacgtcggcgtgcggtgcattgaaatgctgatcgaatcgaccggtatggttagcctgcatcgccaaaacgccggcgtggtgggtcaagatagcgaaacgattgaactggcgccagagtacgcggaagctatcgctaccagagccggcgcattggcggggatcagcccgatgttccagccgtgtgttgtaccaccgaagccgtggaccggtatcaccggtggaggttactgggcgaatggtagacgtccgttggcgttggttcgtacccatagcaaaaaggctctgatgcgttatgaagacgtttacatgccggaagtgtacaaagccatcaacatcgcgcagaacactgcgtggaaaatcaacaaaaaggtgttagctgtggcgaacgtaattacaaaatggaagcactgcccggttgaggacatcccggctattgaacgtgaagagctgccaatgaaaccagaggacattgacatgaatccggaggcgctgaccgcatggaaacgtgcggcagcagcggtctatcgtaaggataaagccagaaagagccgtcgtatctccctggaattcatgcttgagcaggcgaacaaattcgctaaccacaaagccatctggtttccgtataatatggattggcgtggtcgtgtttacgcggtatcgatgttcaacccgcagggtaatgacatgaccaagggtttgttgaccttggccaaaggtaaaccgattggcaaagaaggttactattggttgaagatccacggtgcgaactgcgcaggggtggataaggtaccgttcccggaacgtattaaattcatcgaggaaaaccacgaaaacattatggcgtgcgcaaagagcccgctggaaaacacgtggtgggcagagcaggacagtccattctgcttcttggcgttctgtttcgaatatgcaggtgtccagcaccacggcctgagctataactgcagcctgccgctggcctttgatggttcttgtagcggtattcaacactttagcgccatgctgcgcgatgaggttggtggcagagcagtgaatctgctgccaagcgaaaccgtgcaagatatctatggcattgtggctaagaaggttaatgaaatcctgcaagcagacgcgattaacggcacggacaacgaggttgtcaccgtgaccgatgaaaacaccggtgagatctcggagaaagtgaaactgggcaccaaagccttggctggccaatggctggcatacggcgttactcgctccgtgaccaagcgttcggtgatgacccttgcttacggcagcaaagagtttggtttccgccaacaggttctggaggatactatccaaccggccatcgactctggtaaaggcctgatgttcacgcagccgaatcaggcagcgggctatatggcgaagctgatttgggaatcggttagcgttaccgttgttgcagcggtggaggctatgaactggctgaaatctgcggcgaagctgttagctgcggaggtgaaggacaagaagacgggcgaaatcctgcgtaagcgctgcgcagtgcattgggttacgccggatggttttccggtatggcaggagtacaaaaagcctattcagacccgtctgaacctgatgtttctgggtcaatttcgtctgcagccgacgatcaacaccaataaggactccgagatcgacgcgcacaaacaggagtctggcatcgcacccaatttcgttcactcacaggacggttcccatctgcgtaagaccgtcgtgtgggcacacgagaagtatggcattgagtcgtttgcattgatccacgattcctttggtaccatcccggcggacgctgcgaacctgtttaaagcggttcgcgaaaccatggttgacacctatgaaagttgcgatgttctggcagacttttatgatcagttcgccgaccaactgcatgagtcccagctggataaaatgccggcgttaccggcgaagggcaacttaaatctccgcgacatcctggaatctgatttcgccttcgcgtaa

SEQ ID NO: 168 - DNA, 2652 bp, synthetic construct
  source 1..2652: mol_type = other DNA
atgaatacaattaacatagctaaaaatgatttcagcgatattgaactggctgcgatcccgtttaataccttggcggaccattatggtgagcgtctggcgcgtgagcaacttgctctggagcacgaatcctacgagatgggtgaagcgcgtttccggaagatgttcgagcgccagcttaaggctggcgaggtggcggataacgctgctgcgaagccgttgattacgaccctgctgccgaaaatgattgcgcgtattaacgattggttcgaggaagtgaaagcaaagcgtggtaaacgtccaaccgcattccagtttctgcaagagatcaagccggaggcggtggcatacattacgatcaaaaccactctcgcatgtctcaccagcgcggataatactacggtccaagcggtggccagcgcgattggccgcgcgattgaggacgaagcgcgttttggtcgcattcgtgacctggaagcgaaacattttaagaagaacgttgaagaacaattgaatgaacgcgtgggccacgtttacaagaaagcgttcatgcaagtcgttgaagctgatatgctgagcaaaggcctgttaggtggtgaagcatggagcagctggcataaggaggactcaattcacgtcggcgtgcggtgcattgaaatgctgatcgaatcgaccggtatggttagcctgcatcgccaaaacgccggcgtggtgggtcaagatagcgaaacgattgaactggcgccagagtacgcggaagctatcgctaccagagccggcgcattggcggggatcagcccgatgttccagccgtgtgttgtaccaccgaagccgtggaccggtatcaccggtggaggttactgggcgaatggtagacgtccgttggcgttggttcgtacccatagcaaaaaggctctgatgcgttatgaagacgtttacatgccggaagtgtacaaagccatcaacatcgcgcagaacactgcgtggaaaatcaacaaaaaggtgttagctgtggcgaacgtaattacaaaatggaagcactgcccggttgaggacatcccggctattgaacgtgaagagctgccaatgaaaccagaggacattgacatgaatccggaggcgctgaccgcatggaaacgtgcggcagcagcggtctatcgtaaggataaagccagaaagagccgtcgtatctccctggaattcatgcttgagcaggcgaacaaattcgctaaccacaaagccatctggtttccgtataatatggattggcgtggtcgtgtttacgcggtatcgatgttcaacccgcagggtaatgacatgaccaagggtttgttgaccttggccaaaggtaaaccgattggcaaagaaggttactattggttgaagatccacggtgcgaactgcgcaggggtggataaggtaccgttcccggaacgtattaaattcatcgaggaaaaccacgaaaacattatggcgtgcgcaaagagcccgctggaaaacacgtggtgggcagagcaggacagtccattctgcttcttggcgttctgtttcgaatatgcaggtgtccagcaccacggcctgagctataactgcagcctgccgctggcctttgatggttcttgtagcggtattcaacactttagcgccatgctgcgcgatgaggttggtggcagagcagtgaatctgctgccaagcgaaaccgtgcaagatatctatggcattgtggctaagaaggttaatgaaatcctgcaagcagacgcgattaacggcacggacaacgaggttgtcaccgtgaccgatgaaaacaccggtgagatctcggagaaagtgaaactgggcaccaaagccttggctggccaatggctggcatacggcgttactcgctccgtgaccaagcgttcggtgatgacccttgcttacggcagcaaagagtttggtttccgccaacaggttctggaggatactatccaaccggccatcgactctggtaaaggcctgatgttcacgcagccgaatcaggcagcgggctatatggcgaagctgatttgggaatcggttagcgttaccgttgttgcagcggtggaggctatgaactggctgaaatctgcggcgaagctgttagctgcggaggtgaaggacaagaagacgggcgaaatcctgcgtaagcgctgcgcagtgcattgggttacgccggatggttttccggtatggcaggagtacaaaaagcctattcagacccgtctgaacctgatgtttctgggtcaatttcgtctgcagccgacgatcaacaccaataaggactccgagatcgacgcgcacaaacaggagtctggcatcgcacccaatttcgttcactcacaggacggttcccatctgcgtaagaccgtcgtgtgggcacacgagaagtatggcattgagtcgtttgcattgatccacgattcctttggtaccatcccggcggacgctgcgaacctgtttaaagcggttcgcgaaaccatggttgacacctatgaaagttgcgatgttctggcagacttttatgatcagttcgccgaccaactgcatgagtcccagctggataaaatgccggcgttaccggcgaagggcaacttaaatctccgcgacatcctggaatctgatttcgccttcgcgtaa

SEQ ID NO: 169 - DNA, 2652 bp, synthetic construct
  source 1..2652: mol_type = other DNA
atgaatacaattaacatagctaaaaatgatttcagcgatattgaactggctgcgatcccgtttaataccttggcggaccattatggtgagcgtctggcgcgtgagcaacttgctctggagcacgaatcctacgagatgggtgaagcgcgtttccggaagatgttcgagcgccagcttaaggctggcgaggtggcggataacgctgctgcgaagccgttgattacgaccctgctgccgaaaatgattgcgcgtattaacgattggttcgaggaagtgaaagcaaagcgtggtaaacgtccaaccgcattccagtttctgcaagagatcaagccggaggcggtggcatacattacgatcaaaaccactctcgcatgtctcaccagcgcggataatactacggtccaagcggtggccagcgcgattggccgcgcgattgaggacgaagcgcgttttggtcgcattcgtgacctggaagcgaaacattttaagaagaacgttgaagaacaattgaatgatcgcgtgggccacgtttacaagaaagcgttcatgcaagtcgttgaagctgatatgctgagcaaaggcctgttaggtggtgaagcatggagcagctggcataaggaggactcaattcacgtcggcgtgcggtgcattgaaatgctgatcgaatcgaccggtatggttagcctgcatcgccaaaacgccggcgtggtgggtcaagatagcgaaacgattgaactggcgccagagtacgcggaagctatcgctaccagagccggcgcattggcggggatcagcccgatgttccagccgtgtgttgtaccaccgaagccgtggaccggtatcaccggtggaggttactgggcgaatggtagacgtccgttggcgttggttcgtacccatagcaaaaaggctctgatgcgttatgaagacgtttacatgccggaagtgtacaaagccatcaacatcgcgcagaacactgcgtggaaaatcaacaaaaaggtgttagctgtggcgaacgtaattacaaaatggaagcactgcccggttgaggacatcccggctattgaacgtgaagagctgccaatgaaaccagaggacattgacatgaatccggaggcgctgaccgcatggaaacgtgcggcagcagcggtctatcgtaaggataaagccagaaagagccgtcgtatctccctggaattcatgcttgagcaggcgaacaaattcgctaaccacaaagccatctggtttccgtataatatggattggcgtggtcgtgtttacgcggtatcgatgttcaacccgcagggtaatgacatgaccaagggtttgttgaccttggccaaaggtaaaccgattggcaaagaaggttactattggttgaagatccacggtgcgaactgcgcaggggtggataaggtaccgttcccggaacgtattaaattcatcgaggaaaaccacgaaaacattatggcgtgcgcaaagagcccgctggaaaacacgtggtgggcagagcaggacagtccattctgcttcttggcgttctgtttcgaatatgcaggtgtccagcaccacggcctgagctataactgcagcctgccgctggcctttgatggttcttgtagcggtattcaacactttagcgccatgctgcgcgatgaggttggtggcagagcagtgaatctgctgccaagcgaaaccgtgcaagatatctatggcattgtggctaagaaggttaatgaaatcctgcaagcagacgcgattaacggcacggacaacgaggttgtcaccgtgaccgatgaaaacaccggtgagatctcggagaaagtgaaactgggcaccaaagccttggctggccaatggctggcatacggcgttactcgctccgtgaccaagcgttcggtgatgacccttgcttacggcagcaaagagtttggtttccgccaacaggttctggaggatactatccaaccggccatcgactctggtaaaggcctgatgttcacgcagccgaatcaggcagcgggctatatggcgaagctgatttgggaatcggttagcgttaccgttgttgcagcggtggaggctatgaactggctgaaatctgcggcgaagctgttagctgcggaggtgaaggacaagaagacgggcgaaatcctgcgtaagcgctgcgcagtgcattgggttacgccggatggttttccggtatggcaggagtacaaaaagcctattcagacccgtctgaacctgatgtttctgggtcaatttcgtctgcagccgacgatcaacaccaataaggactccgagatcgacgcgcacaaacaggagtctggcatcgcacccaatttcgttcactcacaggacggttcccatctgcgtaagaccgtcgtgtgggcacacgagaagtatggcattgagtcgtttgcattgatccacgattcctttggtaccatcccggcggacgctgcgaacctgtttaaagcggttcgcgaaaccatggttgacacctatgaaagttgcgatgttctggcagacttttatgatcagttcgccgaccaactgcatgagtcccagctggataaaatgccggcgttaccggcgaagggcaacttaaatctccgcgacatcctggaatctgatttcgccttcgcgtaa

SEQ ID NO: 170 - DNA, 2652 bp, synthetic construct
  source 1..2652: mol_type = other DNA
atgaatacaattaacatagctaaaaatgatttcagcgatattgaactggctgcgatcccgtttaataccttggcggaccattatggtgagcgtctggcgcgtgagcaacttgctctggagcacgaatcctacgagatgggtgaagcgcgtttccggaagatgttcgagcgccagcttaaggctggcgaggtggcggataacgctgctgcgaagccgttgattacgaccctgctgccgaaaatgattgcgcgtattaacgattggttcgaggaagtgaaagcaaagcgtggtaaacgtccaaccgcattccagtttctgcaagagatcaagccggaggcggtggcatacattacgatcaaaaccactctcgcatgtctcaccagcgcggataatactacggtccaagcggtggccagcgcgattggccgcgcgattgaggacgaagcgcgttttggtcgcattcgtgacctggaagcgaaacattttaagaagaacgttgaagaacaattgaataaagaggtgggccacgtttacaagaaagcgttcatgcaagtcgttgaagctgatatgctgagcaaaggcctgttaggtggtgaagcatggagcagctggcataaggaggactcaattcacgtcggcgtgcggtgcattgaaatgctgatcgaatcgaccggtatggttagcctgcatcgccaaaacgccggcgtggtgggtcaagatagcgaaacgattgaactggcgccagagtacgcggaagctatcgctaccagagccggcgcattggcggggatcagcccgatgttccagccgtgtgttgtaccaccgaagccgtggaccggtatcaccggtggaggttactgggcgaatggtagacgtccgttggcgttggttcgtacccatagcaaaaaggctctgatgcgttatgaagacgtttacatgccggaagtgtacaaagccatcaacatcgcgcagaacactgcgtggaaaatcaacaaaaaggtgttagctgtggcgaacgtaattacaaaatggaagcactgcccggttgaggacatcccggctattgaacgtgaagagctgccaatgaaaccagaggacattgacatgaatccggaggcgctgaccgcatggaaacgtgcggcagcagcggtctatcgtaaggataaagccagaaagagccgtcgtatctccctggaattcatgcttgagcaggcgaacaaattcgctaaccacaaagccatctggtttccgtataatatggattggcgtggtcgtgtttacgcggtatcgatgttcaacccgcagggtaatgacatgaccaagggtttgttgaccttggccaaaggtaaaccgattggcaaagaaggttactattggttgaagatccacggtgcgaactgcgcaggggtggataaggtaccgttcccggaacgtattaaattcatcgaggaaaaccacgaaaacattatggcgtgcgcaaagagcccgctggaaaacacgtggtgggcagagcaggacagtccattctgcttcttggcgttctgtttcgaatatgcaggtgtccagcaccacggcctgagctataactgcagcctgccgctggcctttgatggttcttgtagcggtattcaacactttagcgccatgctgcgcgatgaggttggtggcagagcagtgaatctgctgccaagcgaaaccgtgcaagatatctatggcattgtggctaagaaggttaatgaaatcctgcaagcagacgcgattaacggcacggacaacgaggttgtcaccgtgaccgatgaaaacaccggtgagatctcggagaaagtgaaactgggcaccaaagccttggctggccaatggctggcatacggcgttactcgctccgtgaccaagcgttcggtgatgacccttgcttacggcagcaaagagtttggtttccgccaacaggttctggaggatactatccaaccggccatcgactctggtaaaggcctgatgttcacgcagccgaatcaggcagcgggctatatggcgaagctgatttgggaatcggttagcgttaccgttgttgcagcggtggaggctatgaactggctgaaatctgcggcgaagctgttagctgcggaggtgaaggacaagaagacgggcgaaatcctgcgtaagcgctgcgcagtgcattgggttacgccggatggttttccggtatggcaggagtacaaaaagcctattcagacccgtctgaacctgatgtttctgggtcaatttcgtctgcagccgacgatcaacaccaataaggactccgagatcgacgcgcacaaacaggagtctggcatcgcacccaatttcgttcactcacaggacggttcccatctgcgtaagaccgtcgtgtgggcacacgagaagtatggcattgagtcgtttgcattgatccacgattcctttggtaccatcccggcggacgctgcgaacctgtttaaagcggttcgcgaaaccatggttgacacctatgaaagttgcgatgttctggcagacttttatgatcagttcgccgaccaactgcatgagtcccagctggataaaatgccggcgttaccggcgaagggcaacttaaatctccgcgacatcctggaatctgatttcgccttcgcgtaa

SEQ ID NO: 171 - DNA, 2652 bp, synthetic construct
  source 1..2652: mol_type = other DNA
atgaatacaattaacatagctaaaaatgatttcagcgatattgaactggctgcgatcccgtttaataccttggcggaccattatggtgagcgtctggcgcgtgagcaacttgctctggagcacgaatcctacgagatgggtgaagcgcgtttccggaagatgttcgagcgccagcttaaggctggcgaggtggcggataacgctgctgcgaagccgttgattacgaccctgctgccgaaaatgattgcgcgtattaacgattggttcgaggaagtgaaagcaaagcgtggtaaacgtccaaccgcattccagtttctgcaagagatcaagccggaggcggtggcatacattacgatcaaaaccactctcgcatgtctcaccagcgcggataatactacggtccaagcggtggccagcgcgattggccgcgcgattgaggacgaagcgcgttttggtcgcattcgtgacctggaagcgaaacattttaagaagaacgttgaagaacaattgaataaagacgtgggccacgtttacaagaaagcgttcatgcaagtcgttgaagctgatatgctgagcaaaggcctgttaggtggtgaagcatggagcagctggcataaggaggactcaattcacgtcggcgtgcggtgcattgaaatgctgatcgaatcgaccggtatggttagcctgcatcgccaaaacgccggcgtggtgggtcaagatagcgaaacgattgaactggcgccagagtacgcggaagctatcgctaccagagccggcgcattggcggggatcagcccgatgttccagccgtgtgttgtaccaccgaagccgtggaccggtatcaccggtggaggttactgggcgaatggtagacgtccgttggcgttggttcgtacccatagcaaaaaggctctgatgcgttatgaagacgtttacatgccggaagtgtacaaagccatcaacatcgcgcagaacactgcgtggaaaatcaacaaaaaggtgttagctgtggcgaacgtaattacaaaatggaagcactgcccggttgaggacatcccggctattgaacgtgaagagctgccaatgaaaccagaggacattgacatgaatccggaggcgctgaccgcatggaaacgtgcggcagcagcggtctatcgtaaggataaagccagaaagagccgtcgtatctccctggaattcatgcttgagcaggcgaacaaattcgctaaccacaaagccatctggtttccgtataatatggattggcgtggtcgtgtttacgcggtatcgatgttcaacccgcagggtaatgacatgaccaagggtttgttgaccttggccaaaggtaaaccgattggcaaagaaggttactattggttgaagatccacggtgcgaactgcgcaggggtggataaggtaccgttcccggaacgtattaaattcatcgaggaaaaccacgaaaacattatggcgtgcgcaaagagcccgctggaaaacacgtggtgggcagagcaggacagtccattctgcttcttggcgttctgtttcgaatatgcaggtgtccagcaccacggcctgagctataactgcagcctgccgctggcctttgatggttcttgtagcggtattcaacactttagcgccatgctgcgcgatgaggttggtggcagagcagtgaatctgctgccaagcgaaaccgtgcaagatatctatggcattgtggctaagaaggttaatgaaatcctgcaagcagacgcgattaacggcacggacaacgaggttgtcaccgtgaccgatgaaaacaccggtgagatctcggagaaagtgaaactgggcaccaaagccttggctggccaatggctggcatacggcgttactcgctccgtgaccaagcgttcggtgatgacccttgcttacggcagcaaagagtttggtttccgccaacaggttctggaggatactatccaaccggccatcgactctggtaaaggcctgatgttcacgcagccgaatcaggcagcgggctatatggcgaagctgatttgggaatcggttagcgttaccgttgttgcagcggtggaggctatgaactggctgaaatctgcggcgaagctgttagctgcggaggtgaaggacaagaagacgggcgaaatcctgcgtaagcgctgcgcagtgcattgggttacgccggatggttttccggtatggcaggagtacaaaaagcctattcagacccgtctgaacctgatgtttctgggtcaatttcgtctgcagccgacgatcaacaccaataaggactccgagatcgacgcgcacaaacaggagtctggcatcgcacccaatttcgttcactcacaggacggttcccatctgcgtaagaccgtcgtgtgggcacacgagaagtatggcattgagtcgtttgcattgatccacgattcctttggtaccatcccggcggacgctgcgaacctgtttaaagcggttcgcgaaaccatggttgacacctatgaaagttgcgatgttctggcagacttttatgatcagttcgccgaccaactgcatgagtcccagctggataaaatgccggcgttaccggcgaagggcaacttaaatctccgcgacatcctggaatctgatttcgccttcgcgtaa

SEQ ID NO: 172 - DNA, 2652 bp, synthetic construct
  source 1..2652: mol_type = other DNA
atgaatacaattaacatagctaaaaatgatttcagcgatattgaactggctgcgatcccgtttaataccttggcggaccattatggtgagcgtctggcgcgtgagcaacttgctctggagcacgaatcctacgagatgggtgaagcgcgtttccggaagatgttcgagcgccagcttaaggctggcgaggtggcggataacgctgctgcgaagccgttgattacgaccctgctgccgaaaatgattgcgcgtattaacgattggttcgaggaagtgaaagcaaagcgtggtaaacgtccaaccgcattccagtttctgcaagagatcaagccggaggcggtggcatacattacgatcaaaaccactctcgcatgtctcaccagcgcggataatactacggtccaagcggtggccagcgcgattggccgcgcgattgaggacgaagcgcgttttggtcgcattcgtgacctggaagcgaaacattttaagaagaacgttgaagaacaattgaataaagctgtgggccacgtttacaagaaagcgttcatgcaagtcgttgaagctgatatgctgagcaaaggcctgttaggtggtgaagcatggagcagctggcataaggaggactcaattcacgtcggcgtgcggtgcattgaaatgctgatcgaatcgaccggtatggttagcctgcatcgccaaaacgccggcgtggtgggtcaagatagcgaaacgattgaactggcgccagagtacgcggaagctatcgctaccagagccggcgcattggcggggatcagcccgatgttccagccgtgtgttgtaccaccgaagccgtggaccggtatcaccggtggaggttactgggcgaatggtagacgtccgttggcgttggttcgtacccatagcaaaaaggctctgatgcgttatgaagacgtttacatgccggaagtgtacaaagccatcaacatcgcgcagaacactgcgtggaaaatcaacaaaaaggtgttagctgtggcgaacgtaattacaaaatggaagcactgcccggttgaggacatcccggctattgaacgtgaagagctgccaatgaaaccagaggacattgacatgaatccggaggcgctgaccgcatggaaacgtgcggcagcagcggtctatcgtaaggataaagccagaaagagccgtcgtatctccctggaattcatgcttgagcaggcgaacaaattcgctaaccacaaagccatctggtttccgtataatatggattggcgtggtcgtgtttacgcggtatcgatgttcaacccgcagggtaatgacatgaccaagggtttgttgaccttggccaaaggtaaaccgattggcaaagaaggttactattggttgaagatccacggtgcgaactgcgcaggggtggataaggtaccgttcccggaacgtattaaattcatcgaggaaaaccacgaaaacattatggcgtgcgcaaagagcccgctggaaaacacgtggtgggcagagcaggacagtccattctgcttcttggcgttctgtttcgaatatgcaggtgtccagcaccacggcctgagctataactgcagcctgccgctggcctttgatggttcttgtagcggtattcaacactttagcgccatgctgcgcgatgaggttggtggcagagcagtgaatctgctgccaagcgaaaccgtgcaagatatctatggcattgtggctaagaaggttaatgaaatcctgcaagcagacgcgattaacggcacggacaacgaggttgtcaccgtgaccgatgaaaacaccggtgagatctcggagaaagtgaaactgggcaccaaagccttggctggccaatggctggcatacggcgttactcgctccgtgaccaagcgttcggtgatgacccttgcttacggcagcaaagagtttggtttccgccaacaggttctggaggatactatccaaccggccatcgactctggtaaaggcctgatgttcacgcagccgaatcaggcagcgggctatatggcgaagctgatttgggaatcggttagcgttaccgttgttgcagcggtggaggctatgaactggctgaaatctgcggcgaagctgttagctgcggaggtgaaggacaagaagacgggcgaaatcctgcgtaagcgctgcgcagtgcattgggttacgccggatggttttccggtatggcaggagtacaaaaagcctattcagacccgtctgaacctgatgtttctgggtcaatttcgtctgcagccgacgatcaacaccaataaggactccgagatcgacgcgcacaaacaggagtctggcatcgcacccaatttcgttcactcacaggacggttcccatctgcgtaagaccgtcgtgtgggcacacgagaagtatggcattgagtcgtttgcattgatccacgattcctttggtaccatcccggcggacgctgcgaacctgtttaaagcggttcgcgaaaccatggttgacacctatgaaagttgcgatgttctggcagacttttatgatcagttcgccgaccaactgcatgagtcccagctggataaaatgccggcgttaccggcgaagggcaacttaaatctccgcgacatcctggaatctgatttcgccttcgcgtaa

SEQ ID NO: 173 - DNA, 2652 bp, synthetic construct
  source 1..2652: mol_type = other DNA
atgaatacaattaacatagctaaaaatgatttcagcgatattgaactggctgcgatcccgtttaataccttggcggaccattatggtgagcgtctggcgcgtgagcaacttgctctggagcacgaatcctacgagatgggtgaagcgcgtttccggaagatgttcgagcgccagcttaaggctggcgaggtggcggataacgctgctgcgaagccgttgattacgaccctgctgccgaaaatgattgcgcgtattaacgattggttcgaggaagtgaaagcaaagcgtggtaaacgtccaaccgcattccagtttctgcaagagatcaagccggaggcggtggcatacattacgatcaaaaccactctcgcatgtctcaccagcgcggataatactacggtccaagcggtggccagcgcgattggccgcgcgattgaggacgaagcgcgttttggtcgcattcgtgacctggaagcgaaacattttaagaagaacgttgaagaacaattgaatgcaggtgtgggccacgtttacaagaaagcgttcatgcaagtcgttgaagctgatatgctgagcaaaggcctgttaggtggtgaagcatggagcagctggcataaggaggactcaattcacgtcggcgtgcggtgcattgaaatgctgatcgaatcgaccggtatggttagcctgcatcgccaaaacgccggcgtggtgggtcaagatagcgaaacgattgaactggcgccagagtacgcggaagctatcgctaccagagccggcgcattggcggggatcagcccgatgttccagccgtgtgttgtaccaccgaagccgtggaccggtatcaccggtggaggttactgggcgaatggtagacgtccgttggcgttggttcgtacccatagcaaaaaggctctgatgcgttatgaagacgtttacatgccggaagtgtacaaagccatcaacatcgcgcagaacactgcgtggaaaatcaacaaaaaggtgttagctgtggcgaacgtaattacaaaatggaagcactgcccggttgaggacatcccggctattgaacgtgaagagctgccaatgaaaccagaggacattgacatgaatccggaggcgctgaccgcatggaaacgtgcggcagcagcggtcgcccgtaaggataaagccagaaagagccgtcgtatctccctggaattcatgcttgagcaggcgaacaaattcgctaaccacaaagccatctggtttccgtataatatggattggcgtggtcgtgtttacgcggtatcgatgttcaacccgcagggtaatgacatgaccaagggtttgttgaccttggccaaaggtaaaccgattggcaaagaaggttactattggttgaagatccacggtgcgaactgcgcaggggtggataaggtaccgttcccggaacgtattaaattcatcgaggaaaaccacgaaaacattatggcgtgcgcaaagagcccgctggaaaacacgtggtgggcagagcaggacagtccattctgcttcttggcgttctgtttcgaatatgcaggtgtccagcaccacggcctgagctataactgcagcctgccgctggcctttgatggttcttgtagcggtattcaacactttagcgccatgctgcgcgatgaggttggtggcagagcagtgaatctgctgccaagcgaaaccgtgcaagatatctatggcattgtggctaagaaggttaatgaaatcctgcaagcagacgcgattaacggcacggacaacgaggttgtcaccgtgaccgatgaaaacaccggtgagatctcggagaaagtgaaactgggcaccaaagccttggctggccaatggctggcatacggcgttactcgctccgtgaccaagcgttcggtgatgacccttgcttacggcagcaaagagtttggtttccgccaacaggttctggaggatactatccaaccggccatcgactctggtaaaggcctgatgttcacgcagccgaatcaggcagcgggctatatggcgaagctgatttgggaatcggttagcgttaccgttgttgcagcggtggaggctatgaactggctgaaatctgcggcgaagctgttagctgcggaggtgaaggacaagaagacgggcgaaatcctgcgtaagcgctgcgcagtgcattgggttacgccggatggttttccggtatggcaggagtacaaaaagcctattcagacccgtctgaacctgatgtttctgggtcaatttcgtctgcagccgacgatcaacaccaataaggactccgagatcgacgcgcacaaacaggagtctggcatcgcacccaatttcgttcactcacaggacggttcccatctgcgtaagaccgtcgtgtgggcacacgagaagtatggcattgagtcgtttgcattgatccacgattcctttggtaccatcccggcggacgctgcgaacctgtttaaagcggttcgcgaaaccatggttgacacctatgaaagttgcgatgttctggcagacttttatgatcagttcgccgaccaactgcatgagtcccagctggataaaatgccggcgttaccggcgaagggcaacttaaatctccgcgacatcctggaatctgatttcgccttcgcgtaa

SEQ ID NO: 174 - DNA, 2652 bp, synthetic construct
  source 1..2652: mol_type = other DNA
atgaatacaattaacatagctaaaaatgatttcagcgatattgaactggctgcgatcccgtttaataccttggcggaccattatggtgagcgtctggcgcgtgagcaacttgctctggagcacgaatcctacgagatgggtgaagcgcgtttccggaagatgttcgagcgccagcttaaggctggcgaggtggcggataacgctgctgcgaagccgttgattacgaccctgctgccgaaaatgattgcgcgtattaacgattggttcgaggaagtgaaagcaaagcgtggtaaacgtccaaccgcattccagtttctgcaagagatcaagccggaggcggtggcatacattacgatcaaaaccactctcgcatgtctcaccagcgcggataatactacggtccaagcggtggccagcgcgattggccgcgcgattgaggacgaagcgcgttttggtcgcattcgtgacctggaagcgaaacattttaagaagaacgttgaagaacaattgaatgcaggtgtgggccacgtttacaagaaagcgttcatgcaagtcgttgaagctgatatgctgagcaaaggcctgttaggtggtgaagcatggagcagctggcataaggaggactcaattcacgtcggcgtgcggtgcattgaaatgctgatcgaatcgaccggtatggttagcctgcatcgccaaaacgccggcgtggtgggtcaagatagcgaaacgattgaactggcgccagagtacgcggaagctatcgctaccagagccggcgcattggcggggatcagcccgatgttccagccgtgtgttgtaccaccgaagccgtggaccggtatcaccggtggaggttactgggcgaatggtagacgtccgttggcgttggttcgtacccatagcaaaaaggctctgatgcgttatgaagacgtttacatgccggaagtgtacaaagccatcaacatcgcgcagaacactgcgtggaaaatcaacaaaaaggtgttagctgtggcgaacgtaattacaaaatggaagcactgcccggttgaggacatcccggctattgaacgtgaagagctgccaatgaaaccagaggacattgacatgaatccggaggcgctgaccgcatggaaacgtgcggcagcagcggtctatcgtaagtataaagccagaaagagccgtcgtatctccctggaattcatgcttgagcaggcgaacaaattcgctaaccacaaagccatctggtttccgtataatatggattggcgtggtcgtgtttacgcggtatcgatgttcaacccgcagggtaatgacatgaccaagggtttgttgaccttggccaaaggtaaaccgattggcaaagaaggttactattggttgaagatccacggtgcgaactgcgcaggggtggataaggtaccgttcccggaacgtattaaattcatcgaggaaaaccacgaaaacattatggcgtgcgcaaagagcccgctggaaaacacgtggtgggcagagcaggacagtccattctgcttcttggcgttctgtttcgaatatgcaggtgtccagcaccacggcctgagctataactgcagcctgccgctggcctttgatggttcttgtagcggtattcaacactttagcgccatgctgcgcgatgaggttggtggcagagcagtgaatctgctgccaagcgaaaccgtgcaagatatctatggcattgtggctaagaaggttaatgaaatcctgcaagcagacgcgattaacggcacggacaacgaggttgtcaccgtgaccgatgaaaacaccggtgagatctcggagaaagtgaaactgggcaccaaagccttggctggccaatggctggcatacggcgttactcgctccgtgaccaagcgttcggtgatgacccttgcttacggcagcaaagagtttggtttccgccaacaggttctggaggatactatccaaccggccatcgactctggtaaaggcctgatgttcacgcagccgaatcaggcagcgggctatatggcgaagctgatttgggaatcggttagcgttaccgttgttgcagcggtggaggctatgaactggctgaaatctgcggcgaagctgttagctgcggaggtgaaggacaagaagacgggcgaaatcctgcgtaagcgctgcgcagtgcattgggttacgccggatggttttccggtatggcaggagtacaaaaagcctattcagacccgtctgaacctgatgtttctgggtcaatttcgtctgcagccgacgatcaacaccaataaggactccgagatcgacgcgcacaaacaggagtctggcatcgcacccaatttcgttcactcacaggacggttcccatctgcgtaagaccgtcgtgtgggcacacgagaagtatggcattgagtcgtttgcattgatccacgattcctttggtaccatcccggcggacgctgcgaacctgtttaaagcggttcgcgaaaccatggttgacacctatgaaagttgcgatgttctggcagacttttatgatcagttcgccgaccaactgcatgagtcccagctggataaaatgccggcgttaccggcgaagggcaacttaaatctccgcgacatcctggaatctgatttcgccttcgcgtaa

SEQ ID NO: 175 - DNA, 2652 bp, synthetic construct
  source 1..2652: mol_type = other DNA
atgaatacaattaacatagctaaaaatgatttcagcgatattgaactggctgcgatcccgtttaataccttggcggaccattatggtgagcgtctggcgcgtgagcaacttgctctggagcacgaatcctacgagatgggtgaagcgcgtttccggaagatgttcgagcgccagcttaaggctggcgaggtggcggataacgctgctgcgaagccgttgattacgaccctgctgccgaaaatgattgcgcgtattaacgattggttcgaggaagtgaaagcaaagcgtggtaaacgtccaaccgcattccagtttctgcaagagatcaagccggaggcggtggcatacattacgatcaaaaccactctcgcatgtctcaccagcgcggataatactacggtccaagcggtggccagcgcgattggccgcgcgattgaggacgaagcgcgttttggtcgcattcgtgacctggaagcgaaacattttaagaagaacgttgaagaacaattgaatgcaggtgtgggccacgtttacaagaaagcgttcatgcaagtcgttgaagctgatatgctgagcaaaggcctgttaggtggtgaagcatggagcagctggcataaggaggactcaattcacgtcggcgtgcggtgcattgaaatgctgatcgaatcgaccggtatggttagcctgcatcgccaaaacgccggcgtggtgggtcaagatagcgaaacgattgaactggcgccagagtacgcggaagctatcgctaccagagccggcgcattggcggggatcagcccgatgttccagccgtgtgttgtaccaccgaagccgtggaccggtatcaccggtggaggttactgggcgaatggtagacgtccgttggcgttggttcgtacccatagcaaaaaggctctgatgcgttatgaagacgtttacatgccggaagtgtacaaagccatcaacatcgcgcagaacactgcgtggaaaatcaacaaaaaggtgttagctgtggcgaacgtaattacaaaatggaagcactgcccggttgaggacatcccggctattgaacgtgaagagctgccaatgaaaccagaggacattgacatgaatccggaggcgctgaccgcatggaaacgtgcggcagcagcggtctatcgtaaggataaagccagaaagagccgtcgtatctccctggaattcatgcttgagcaggcgaacaaattcgctaaccacaaagccatctggtttccgtataatatggattggcgtggtcgtgtttacgcggtatcgatgttcaacccgcagggtaatgacatgaccaagggtttgttgaccttggccaaaggtaaaccgattggcaaagaaggttactattggttgaagatccacggtgcgaactgcgcaggggtggataaggtaccgttcccggaacgtattaaattcatcgaggaaaaccacgaaaacattatggcgtgcgcaaagagcccgctggaaaacacgtggtgggcagagcaggacagtccattctgcttcttggcgttctgtttcgaatatgcaggtgtccagcaccacggcctgagctataactgcagcctgccgctggcctttgatggttcttgtagcggtattcaacactttagcgccatgctgcgcgatgaggttggtggcagagcagtgaatctgctgccaagcgaaaccgtgcaagatatctatggcattgtggctaagaaggttaatgaaatcctgcaagcagacgcgattaacggcacggacaacgaggttgtcaccgtgaccgatgaaaacaccggtgagatctcggagaaagtgaaactgggcaccaaagccttggctggccaatggctggcatacggcgttactcgctccgtgaccaagcgttcggtgatgacccttgcttacggcagcaaagagtttggtttccgccaacaggttctggaggatactatccaaccggccatcgactctggtaaaggcctgatgttcacgcagccgaatcaggcagcgggctatatggcgaagctgatttgggaatcggttagcgttaccgttgttgcagcggtggaggctatgaactggctgaaatctgcggcgaagctgttagctgcggaggtgaaggacaagaagacgggcgaaatcctgcgtaagcgctgcgcagtgcattgggttacgccggatggttttccggtatggcaggagtacaaaaagcctattcagacccgtctgaacctgatgtttctgggtcaatttcgtctgcagccgacgatcaacaccaataaggactccgagatcgacgcgcacaaacaggagtctggcatcgcacccaatttcgttcactcacaggacggttcccatctgcgtaagaccgtcgtgtgggcacacgagaagtatggcattgagtcgtttgcattgatccacgattcctttggtaccatcccggcggacgctgcgaacctgtttaaagcggttcgcgaaaccatggttgacacctatgaaagttgcgatgttctggcagacttttatgatcagttcgccgaccaactgcatgagtcccagctggataaaatgccggcgttaccggcgaagggcaacttaaatctccgcgacatcctggaatctgattacgccttcgcgtaa

SEQ ID NO: 176 - DNA, 2652 bp, synthetic construct
  source 1..2652: mol_type = other DNA
atgaatacaattaacatagctaaaaatgatttcagcgatattgaactggctgcgatcccgtttaataccttggcggaccattatggtgagcgtctggcgcgtgagcaacttgctctggagcacgaatcctacgagatgggtgaagcgcgtttccggaagatgttcgagcgccagcttaaggctggcgaggtggcggataacgctgctgcgaagccgttgattacgaccctgctgccgaaaatgattgcgcgtattaacgattggttcgaggaagtgaaagcaaagcgtggtaaacgtccaaccgcattccagtttctgcaagagatcaagccggaggcggtggcatacattacgatcaaaaccactctcgcatgtctcaccagcgcggataatactacggtccaagcggtggccagcgcgattggccgcgcgattgaggacgaagcgcgttttggtcgcattcgtgacctggaagcgaaacattttaagaagaacgttgaagaacaattgaatggaggtgtgggccacgtttacaagaaagcgttcatgcaagtcgttgaagctgatatgctgagcaaaggcctgttaggtggtgaagcatggagcagctggcataaggaggactcaattcacgtcggcgtgcggtgcattgaaatgctgatcgaatcgaccggtatggttagcctgcatcgccaaaacgccggcgtggtgggtcaagatagcgaaacgattgaactggcgccagagtacgcggaagctatcgctaccagagccggcgcattggcggggatcagcccgatgttccagccgtgtgttgtaccaccgaagccgtggaccggtatcaccggtggaggttactgggcgaatggtagacgtccgttggcgttggttcgtacccatagcaaaaaggctctgatgcgttatgaagacgtttacatgccggaagtgtacaaagccatcaacatcgcgcagaacactgcgtggaaaatcaacaaaaaggtgttagctgtggcgaacgtaattacaaaatggaagcactgcccggttgaggacatcccggctattgaacgtgaagagctgccaatgaaaccagaggacattgacatgaatccggaggcgctgaccgcatggaaacgtgcggcagcagcggtcgcgcgtaaggataaagccagaaagagccgtcgtatctccctggaattcatgcttgagcaggcgaacaaattcgctaaccacaaagccatctggtttccgtataatatggattggcgtggtcgtgtttacgcggtatcgatgttcaacccgcagggtaatgacatgaccaagggtttgttgaccttggccaaaggtaaaccgattggcaaagaaggttactattggttgaagatccacggtgcgaactgcgcaggggtggataaggtaccgttcccggaacgtattaaattcatcgaggaaaaccacgaaaacattatggcgtgcgcaaagagcccgctggaaaacacgtggtgggcagagcaggacagtccattctgcttcttggcgttctgtttcgaatatgcaggtgtccagcaccacggcctgagctataactgcagcctgccgctggcctttgatggttcttgtagcggtattcaacactttagcgccatgctgcgcgatgaggttggtggcagagcagtgaatctgctgccaagcgaaaccgtgcaagatatctatggcattgtggctaagaaggttaatgaaatcctgcaagcagacgcgattaacggcacggacaacgaggttgtcaccgtgaccgatgaaaacaccggtgagatctcggagaaagtgaaactgggcaccaaagccttggctggccaatggctggcatacggcgttactcgctccgtgaccaagcgttcggtgatgacccttgcttacggcagcaaagagtttggtttccgccaacaggttctggaggatactatccaaccggccatcgactctggtaaaggcctgatgttcacgcagccgaatcaggcagcgggctatatggcgaagctgatttgggaatcggttagcgttaccgttgttgcagcggtggaggctatgaactggctgaaatctgcggcgaagctgttagctgcggaggtgaaggacaagaagacgggcgaaatcctgcgtaagcgctgcgcagtgcattgggttacgccggatggttttccggtatggcaggagtacaaaaagcctattcagacccgtctgaacctgatgtttctgggtcaatttcgtctgcagccgacgatcaacaccaataaggactccgagatcgacgcgcacaaacaggagtctggcatcgcacccaatttcgttcactcacaggacggttcccatctgcgtaagaccgtcgtgtgggcacacgagaagtatggcattgagtcgtttgcattgatccacgattcctttggtaccatcccggcggacgctgcgaacctgtttaaagcggttcgcgaaaccatggttgacacctatgaaagttgcgatgttctggcagacttttatgatcagttcgccgaccaactgcatgagtcccagctggataaaatgccggcgttaccggcgaagggcaacttaaatctccgcgacatcctggaatctgatttcgccttcgcgtaa

SEQ ID NO: 177 - DNA, 2652 bp, synthetic construct
  source 1..2652: mol_type = other DNA
atgaatacaattaacatagctaaaaatgatttcagcgatattgaactggctgcgatcccgtttaataccttggcggaccattatggtgagcgtctggcgcgtgagcaacttgctctggagcacgaatcctacgagatgggtgaagcgcgtttccggaagatgttcgagcgccagcttaaggctggcgaggtggcggataacgctgctgcgaagccgttgattacgaccctgctgccgaaaatgattgcgcgtattaacgattggttcgaggaagtgaaagcaaagcgtggtaaacgtccaaccgcattccagtttctgcaagagatcaagccggaggcggtggcatacattacgatcaaaaccactctcgcatgtctcaccagcgcggataatactacggtccaagcggtggccagcgcgattggccgcgcgattgaggacgaagcgcgttttggtcgcattcgtgacctggaagcgaaacattttaagaagaacgttgaagaacaattgaatggaggtgtgggccacgtttacaagaaagcgttcatgcaagtcgttgaagctgatatgctgagcaaaggcctgttaggtggtgaagcatggagcagctggcataaggaggactcaattcacgtcggcgtgcggtgcattgaaatgctgatcgaatcgaccggtatggttagcctgcatcgccaaaacgccggcgtggtgggtcaagatagcgaaacgattgaactggcgccagagtacgcggaagctatcgctaccagagccggcgcattggcggggatcagcccgatgttccagccgtgtgttgtaccaccgaagccgtggaccggtatcaccggtggaggttactgggcgaatggtagacgtccgttggcgttggttcgtacccatagcaaaaaggctctgatgcgttatgaagacgtttacatgccggaagtgtacaaagccatcaacatcgcgcagaacactgcgtggaaaatcaacaaaaaggtgttagctgtggcgaacgtaattacaaaatggaagcactgcccggttgaggacatcccggctattgaacgtgaagagctgccaatgaaaccagaggacattgacatgaatccggaggcgctgaccgcatggaaacgtgcggcagcagcggtctatcgtaagtataaagccagaaagagccgtcgtatctccctggaattcatgcttgagcaggcgaacaaattcgctaaccacaaagccatctggtttccgtataatatggattggcgtggtcgtgtttacgcggtatcgatgttcaacccgcagggtaatgacatgaccaagggtttgttgaccttggccaaaggtaaaccgattggcaaagaaggttactattggttgaagatccacggtgcgaactgcgcaggggtggataaggtaccgttcccggaacgtattaaattcatcgaggaaaaccacgaaaacattatggcgtgcgcaaagagcccgctggaaaacacgtggtgggcagagcaggacagtccattctgcttcttggcgttctgtttcgaatatgcaggtgtccagcaccacggcctgagctataactgcagcctgccgctggcctttgatggttcttgtagcggtattcaacactttagcgccatgctgcgcgatgaggttggtggcagagcagtgaatctgctgccaagcgaaaccgtgcaagatatctatggcattgtggctaagaaggttaatgaaatcctgcaagcagacgcgattaacggcacggacaacgaggttgtcaccgtgaccgatgaaaacaccggtgagatctcggagaaagtgaaactgggcaccaaagccttggctggccaatggctggcatacggcgttactcgctccgtgaccaagcgttcggtgatgacccttgcttacggcagcaaagagtttggtttccgccaacaggttctggaggatactatccaaccggccatcgactctggtaaaggcctgatgttcacgcagccgaatcaggcagcgggctatatggcgaagctgatttgggaatcggttagcgttaccgttgttgcagcggtggaggctatgaactggctgaaatctgcggcgaagctgttagctgcggaggtgaaggacaagaagacgggcgaaatcctgcgtaagcgctgcgcagtgcattgggttacgccggatggttttccggtatggcaggagtacaaaaagcctattcagacccgtctgaacctgatgtttctgggtcaatttcgtctgcagccgacgatcaacaccaataaggactccgagatcgacgcgcacaaacaggagtctggcatcgcacccaatttcgttcactcacaggacggttcccatctgcgtaagaccgtcgtgtgggcacacgagaagtatggcattgagtcgtttgcattgatccacgattcctttggtaccatcccggcggacgctgcgaacctgtttaaagcggttcgcgaaaccatggttgacacctatgaaagttgcgatgttctggcagacttttatgatcagttcgccgaccaactgcatgagtcccagctggataaaatgccggcgttaccggcgaagggcaacttaaatctccgcgacatcctggaatctgatttcgccttcgcgtaa

SEQ ID NO: 178 - DNA, 2652 bp, synthetic construct
  source 1..2652: mol_type = other DNA
atgaatacaattaacatagctaaaaatgatttcagcgatattgaactggctgcgatcccgtttaataccttggcggaccattatggtgagcgtctggcgcgtgagcaacttgctctggagcacgaatcctacgagatgggtgaagcgcgtttccggaagatgttcgagcgccagcttaaggctggcgaggtggcggataacgctgctgcgaagccgttgattacgaccctgctgccgaaaatgattgcgcgtattaacgattggttcgaggaagtgaaagcaaagcgtggtaaacgtccaaccgcattccagtttctgcaagagatcaagccggaggcggtggcatacattacgatcaaaaccactctcgcatgtctcaccagcgcggataatactacggtccaagcggtggccagcgcgattggccgcgcgattgaggacgaagcgcgttttggtcgcattcgtgacctggaagcgaaacattttaagaagaacgttgaagaacaattgaatggaggtgtgggccacgtttacaagaaagcgttcatgcaagtcgttgaagctgatatgctgagcaaaggcctgttaggtggtgaagcatggagcagctggcataaggaggactcaattcacgtcggcgtgcggtgcattgaaatgctgatcgaatcgaccggtatggttagcctgcatcgccaaaacgccggcgtggtgggtcaagatagcgaaacgattgaactggcgccagagtacgcggaagctatcgctaccagagccggcgcattggcggggatcagcccgatgttccagccgtgtgttgtaccaccgaagccgtggaccggtatcaccggtggaggttactgggcgaatggtagacgtccgttggcgttggttcgtacccatagcaaaaaggctctgatgcgttatgaagacgtttacatgccggaagtgtacaaagccatcaacatcgcgcagaacactgcgtggaaaatcaacaaaaaggtgttagctgtggcgaacgtaattacaaaatggaagcactgcccggttgaggacatcccggctattgaacgtgaagagctgccaatgaaaccagaggacattgacatgaatccggaggcgctgaccgcatggaaacgtgcggcagcagcggtctatcgtaaggataaagccagaaagagccgtcgtatctccctggaattcatgcttgagcaggcgaacaaattcgctaaccacaaagccatctggtttccgtataatatggattggcgtggtcgtgtttacgcggtatcgatgttcaacccgcagggtaatgacatgaccaagggtttgttgaccttggccaaaggtaaaccgattggcaaagaaggttactattggttgaagatccacggtgcgaactgcgcaggggtggataaggtaccgttcccggaacgtattaaattcatcgaggaaaaccacgaaaacattatggcgtgcgcaaagagcccgctggaaaacacgtggtgggcagagcaggacagtccattctgcttcttggcgttctgtttcgaatatgcaggtgtccagcaccacggcctgagctataactgcagcctgccgctggcctttgatggttcttgtagcggtattcaacactttagcgccatgctgcgcgatgaggttggtggcagagcagtgaatctgctgccaagcgaaaccgtgcaagatatctatggcattgtggctaagaaggttaatgaaatcctgcaagcagacgcgattaacggcacggacaacgaggttgtcaccgtgaccgatgaaaacaccggtgagatctcggagaaagtgaaactgggcaccaaagccttggctggccaatggctggcatacggcgttactcgctccgtgaccaagcgttcggtgatgacccttgcttacggcagcaaagagtttggtttccgccaacaggttctggaggatactatccaaccggccatcgactctggtaaaggcctgatgttcacgcagccgaatcaggcagcgggctatatggcgaagctgatttgggaatcggttagcgttaccgttgttgcagcggtggaggctatgaactggctgaaatctgcggcgaagctgttagctgcggaggtgaaggacaagaagacgggcgaaatcctgcgtaagcgctgcgcagtgcattgggttacgccggatggttttccggtatggcaggagtacaaaaagcctattcagacccgtctgaacctgatgtttctgggtcaatttcgtctgcagccgacgatcaacaccaataaggactccgagatcgacgcgcacaaacaggagtctggcatcgcacccaatttcgttcactcacaggacggttcccatctgcgtaagaccgtcgtgtgggcacacgagaagtatggcattgagtcgtttgcattgatccacgattcctttggtaccatcccggcggacgctgcgaacctgtttaaagcggttcgcgaaaccatggttgacacctatgaaagttgcgatgttctggcagacttttatgatcagttcgccgaccaactgcatgagtcccagctggataaaatgccggcgttaccggcgaagggcaacttaaatctccgcgacatcctggaatctgattacgccttcgcgtaa

SEQ ID NO: 179 - DNA, 2646 bp, synthetic construct
  source 1..2646: mol_type = other DNA
atgaatacaattaacatagctaaaaatgatttcagcgatattgaactggctgcgatcccgtttaataccttggcggaccattatggtgagcgtctggcgcgtgagcaacttgctctggagcacgaatcctacgagatgggtgaagcgcgtttccggaagatgttcgagcgccagcttaaggctggcgaggtggcggataacgctgctgcgaagccgttgattacgaccctgctgccgaaaatgattgcgcgtattaacgattggttcgaggaagtgaaagcaaagcgtggtaaacgtccaaccgcattccagtttctgcaagagatcaagccggaggcggtggcatacattacgatcaaaaccactctcgcatgtctcaccagcgcggataatactacggtccaagcggtggccagcgcgattggccgcgcgattgaggacgaagcgcgttttggtcgcattcgtgacctggaagcgaaacattttaagaagaacgttgaagaacaattgaatgtgggccacgtttacaagaaagcgttcatgcaagtcgttgaagctgatatgctgagcaaaggcctgttaggtggtgaagcatggagcagctggcataaggaggactcaattcacgtcggcgtgcggtgcattgaaatgctgatcgaatcgaccggtatggttagcctgcatcgccaaaacgccggcgtggtgggtcaagatagcgaaacgattgaactggcgccagagtacgcggaagctatcgctaccagagccggcgcattggcggggatcagcccgatgttccagccgtgtgttgtaccaccgaagccgtggaccggtatcaccggtggaggttactgggcgaatggtagacgtccgttggcgttggttcgtacccatagcaaaaaggctctgatgcgttatgaagacgtttacatgccggaagtgtacaaagccatcaacatcgcgcagaacactgcgtggaaaatcaacaaaaaggtgttagctgtggcgaacgtaattacaaaatggaagcactgcccggttgaggacatcccggctattgaacgtgaagagctgccaatgaaaccagaggacattgacatgaatccggaggcgctgaccgcatggaaacgtgcggcagcagcggtctatcgtaaggataaagccagaaagagccgtcgtatctccctggaattcatgcttgagcaggcgaacaaattcgctaaccacaaagccatctggtttccgtataatatggattggcgtggtcgtgtttacgcggtatcgatgttcaacccgcagggtaatgacatgaccaagggtttgttgaccttggccaaaggtaaaccgattggcaaagaaggttactattggttgaagatccacggtgcgaactgcgcaggggtggataaggtaccgttcccggaacgtattaaattcatcgaggaaaaccacgaaaacattatggcgtgcgcaaagagcccgctggaaaacacgtggtgggcagagcaggacagtccattctgcttcttggcgttctgtttcgaatatgcaggtgtccagcaccacggcctgagctataactgcagcctgccgctggcctttgatggttcttgtagcggtattcaacactttagcgccatgctgcgcgatgaggttggtggcagagcagtgaatctgctgccaagcgaaaccgtgcaagatatctatggcattgtggctaagaaggttaatgaaatcctgcaagcagacgcgattaacggcacggacaacgaggttgtcaccgtgaccgatgaaaacaccggtgagatctcggagaaagtgaaactgggcaccaaagccttggctggccaatggctggcatacggcgttactcgctccgtgaccaagcgttcggtgatgacccttgcttacggcagcaaagagtttggtttccgccaacaggttctggaggatactatccaaccggccatcgactctggtaaaggcctgatgttcacgcagccgaatcaggcagcgggctatatggcgaagctgatttgggaatcggttagcgttaccgttgttgcagcggtggaggctatgaactggctgaaatctgcggcgaagctgttagctgcggaggtgaaggacaagaagacgggcgaaatcctgcgtaagcgctgcgcagtgcattgggttacgccggatggttttccggtatggcaggagtacaaaaagcctattcagacccgtctgaacctgatgtttctgggtcaatttcgtctgcagccgacgatcaacaccaataaggactccgagatcgacgcgcacaaacaggagtctggcatcgcacccaatttcgttcactcacaggacggttcccatctgcgtaagaccgtcgtgtgggcacacgagaagtatggcattgagtcgtttgcattgatccacgattcctttggtaccatcccggcggacgctgcgaacctgtttaaagcggttcgcgaaaccatggttgacacctatgaaagttgcgatgttctggcagacttttatgatcagttcgccgaccaactgcatgagtcccagctggataaaatgccggcgttaccggcgaagggcaacttaaatctccgcgacatcctggaatctgattacgccttcgcgtaa

SEQ ID NO: 180 - DNA, 2646 bp, synthetic construct
  source 1..2646: mol_type = other DNA
atgaatacaattaacatagctaaaaatgatttcagcgatattgaactggctgcgatcccgtttaataccttggcggaccattatggtgagcgtctggcgcgtgagcaacttgctctggagcacgaatcctacgagatgggtgaagcgcgtttccggaagatgttcgagcgccagcttaaggctggcgaggtggcggataacgctgctgcgaagccgttgattacgaccctgctgccgaaaatgattgcgcgtattaacgattggttcgaggaagtgaaagcaaagcgtggtaaacgtccaaccgcattccagtttctgcaagagatcaagccggaggcggtggcatacattacgatcaaaaccactctcgcatgtctcaccagcgcggataatactacggtccaagcggtggccagcgcgattggccgcgcgattgaggacgaagcgcgttttggtcgcattcgtgacctggaagcgaaacattttaagaagaacgttgaagaacaattgaatgtgggccacgttcacaagaaagcgttcatgcaagtcgttgaagctgatatgctgagcaaaggcctgttaggtggtgaagcatggagcagctggcataaggaggactcaattcacgtcggcgtgcggtgcattgaaatgctgatcgaatcgaccggtatggttagcctgcatcgccaaaacgccggcgtggtgggtcaagatagcgaaacgattgaactggcgccagagtacgcggaagctatcgctaccagagccggcgcattggcggggatcagcccgatgttccagccgtgtgttgtaccaccgaagccgtggaccggtatcaccggtggaggttactgggcgaatggtagacgtccgttggcgttggttcgtacccatagcaaaaaggctctgatgcgttatgaagacgtttacatgccggaagtgtacaaagccatcaacatcgcgcagaacactgcgtggaaaatcaacaaaaaggtgttagctgtggcgaacgtaattacaaaatggaagcactgcccggttgaggacatcccggctattgaacgtgaagagctgccaatgaaaccagaggacattgacatgaatccggaggcgctgaccgcatggaaacgtgcggcagcagcggtctatcgtaaggataaagccagaaagagccgtcgtatctccctggaattcatgcttgagcaggcgaacaaattcgctaaccacaaagccatctggtttccgtataatatggattggcgtggtcgtgtttacgcggtatcgatgttcaacccgcagggtaatgacatgaccaagggtttgttgaccttggccaaaggtaaaccgattggcaaagaaggttactattggttgaagatccacggtgcgaactgcgcaggggtggataaggtaccgttcccggaacgtattaaattcatcgaggaaaaccacgaaaacattatggcgtgcgcaaagagcccgctggaaaacacgtggtgggcagagcaggacagtccattctgcttcttggcgttctgtttcgaatatgcaggtgtccagcaccacggcctgagctataactgcagcctgccgctggcctttgatggttcttgtagcggtattcaacactttagcgccatgctgcgcgatgaggttggtggcagagcagtgaatctgctgccaagcgaaaccgtgcaagatatctatggcattgtggctaagaaggttaatgaaatcctgcaagcagacgcgattaacggcacggacaacgaggttgtcaccgtgaccgatgaaaacaccggtgagatctcggagaaagtgaaactgggcaccaaagccttggctggccaatggctggcatacggcgttactcgctccgtgaccaagcgttcggtgatgacccttgcttacggcagcaaagagtttggtttccgccaacaggttctggaggatactatccaaccggccatcgactctggtaaaggcctgatgttcacgcagccgaatcaggcagcgggctatatggcgaagctgatttgggaatcggttagcgttaccgttgttgcagcggtggaggctatgaactggctgaaatctgcggcgaagctgttagctgcggaggtgaaggacaagaagacgggcgaaatcctgcgtaagcgctgcgcagtgcattgggttacgccggatggttttccggtatggcaggagtacaaaaagcctattcagacccgtctgaacctgatgtttctgggtcaatttcgtctgcagccgacgatcaacaccaataaggactccgagatcgacgcgcacaaacaggagtctggcatcgcacccaatttcgttcactcacaggacggttcccatctgcgtaagaccgtcgtgtgggcacacgagaagtatggcattgagtcgtttgcattgatccacgattcctttggtaccatcccggcggacgctgcgaacctgtttaaagcggttcgcgaaaccatggttgacacctatgaaagttgcgatgttctggcagacttttatgatcagttcgccgaccaactgcatgagtcccagctggataaaatgccggcgttaccggcgaagggcaacttaaatctccgcgacatcctggaatctgatttcgccttcgcgtaa

SEQ ID NO: 181 - DNA, 2646 bp, synthetic construct
  source 1..2646: mol_type = other DNA
atgaatacaattaacatagctaaaaatgatttcagcgatattgaactggctgcgatcccgtttaataccttggcggaccattatggtgagcgtctggcgcgtgagcaacttgctctggagcacgaatcctacgagatgggtgaagcgcgtttccggaagatgttcgagcgccagcttaaggctggcgaggtggcggataacgctgctgcgaagccgttgattacgaccctgctgccgaaaatgattgcgcgtattaacgattggttcgaggaagtgaaagcaaagcgtggtaaacgtccaaccgcattccagtttctgcaagagatcaagccggaggcggtggcatacattacgatcaaaaccactctcgcatgtctcaccagcgcggaaaatactacggtccaagcggtggccagcgcgattggccgcgcgattgaggacgaagcgcgttttggtcgcattcgtgacctggaagcgaaacattttaagaagaacgttgaagaacaattgaatgtgggccacgtttacaagaaagcgttcatgcaagtcgttgaagctgatatgctgagcaaaggcctgttaggtggtgaagcatggagcagctggcataaggaggactcaattcacgtcggcgtgcggtgcattgaaatgctgatcgaatcgaccggtatggttagcctgcatcgccaaaacgccggcgtggtgggtcaagatagcgaaacgattgaactggcgccagagtacgcggaagctatcgctaccagagccggcgcattggcggggatcagcccgatgttccagccgtgtgttgtaccaccgaagccgtggaccggtatcaccggtggaggttactgggcgaatggtagacgtccgttggcgttggttcgtacccatagcaaaaaggctctgatgcgttatgaagacgtttacatgccggaagtgtacaaagccatcaacatcgcgcagaacactgcgtggaaaatcaacaaaaaggtgttagctgtggcgaacgtaattacaaaatggaagcactgcccggttgaggacatcccggctattgaacgtgaagagctgccaatgaaaccagaggacattgacatgaatccggaggcgctgaccgcatggaaacgtgcggcagcagcggtctatcgtaaggataaagccagaaagagccgtcgtatctccctggaattcatgcttgagcaggcgaacaaattcgctaaccacaaagccatctggtttccgtataatatggattggcgtggtcgtgtttacgcggtatcgatgttcaacccgcagggtaatgacatgaccaagggtttgttgaccttggccaaaggtaaaccgattggcaaagaaggttactattggttgaagatccacggtgcgaactgcgcaggggtggataaggtaccgttcccggaacgtattaaattcatcgaggaaaaccacgaaaacattatggcgtgcgcaaagagcccgctggaaaacacgtggtgggcagagcaggacagtccattctgcttcttggcgttctgtttcgaatatgcaggtgtccagcaccacggcctgagctataactgcagcctgccgctggcctttgatggttcttgtagcggtattcaacactttagcgccatgctgcgcgatgaggttggtggcagagcagtgaatctgctgccaagcgaaaccgtgcaagatatctatggcattgtggctaagaaggttaatgaaatcctgcaagcagacgcgattaacggcacggacaacgaggttgtcaccgtgaccgatgaaaacaccggtgagatctcggagaaagtgaaactgggcaccaaagccttggctggccaatggctggcatacggcgttactcgctccgtgaccaagcgttcggtgatgacccttgcttacggcagcaaagagtttggtttccgccaacaggttctggaggatactatccaaccggccatcgactctggtaaaggcctgatgttcacgcagccgaatcaggcagcgggctatatggcgaagctgatttgggaatcggttagcgttaccgttgttgcagcggtggaggctatgaactggctgaaatctgcggcgaagctgttagctgcggaggtgaaggacaagaagacgggcgaaatcctgcgtaagcgctgcgcagtgcattgggttacgccggatggttttccggtatggcaggagtacaaaaagcctattcagacccgtctgaacctgatgtttctgggtcaatttcgtctgcagccgacgatcaacaccaataaggactccgagatcgacgcgcacaaacaggagtctggcatcgcacccaatttcgttcactcacaggacggttcccatctgcgtaagaccgtcgtgtgggcacacgagaagtatggcattgagtcgtttgcattgatccacgattcctttggtaccatcccggcggacgctgcgaacctgtttaaagcggttcgcgaaaccatggttgacacctatgaaagttgcgatgttctggcagacttttatgatcagttcgccgaccaactgcatgagtcccagctggataaaatgccggcgttaccggcgaagggcaacttaaatctccgcgacatcctggaatctgatttcgccttcgcgtaa

SEQ ID NO: 182 - DNA, 2649 bp, synthetic construct
  source 1..2649: mol_type = other DNA
atgaatacaattaacatagctaaaaatgatttcagcgatattgaactggctgcgatcccgtttaataccttggcggaccattatggtgagcgtctggcgcgtgagcaacttgctctggagcacgaatcctacgagatgggtgaagcgcgtttccggaagatgttcgagcgccagcttaaggctggcgaggtggcggataacgctgctgcgaagccgttgattacgaccctgctgccgaaaatgattgcgcgtattaacgattggttcgaggaagtgaaagcaaagcgtggtaaacgtccaaccgcattccagtttctgcaagagatcaagccggaggcggtggcatacattacgatcaaaaccactctcgcatgtctcaccagcgcggataatactacggtccaagcggtggccagcgcgattggccgcgcgattgaggacgaagcgcgttttggtcgcattcgtgacctggaagcgaaacattttaagaagaacgttgaagaacaattgaatgctgtgggccacgtttacaagaaagcgttcatgcaagtcgttgaagctgatatgctgagcaaaggcctgttaggtggtgaagcatggagcagctggcataaggaggactcaattcacgtcggcgtgcggtgcattgaaatgctgatcgaatcgaccggtatggttagcctgcatcgccaaaacgccggcgtggtgggtcaagatagcgaaacgattgaactggcgccagagtacgcggaagctatcgctaccagagccggcgcattggcggggatcagcccgatgttccagccgtgtgttgtaccaccgaagccgtggaccggtatcaccggtggaggttactgggcgaatggtagacgtccgttggcgttggttcgtacccatagcaaaaaggctctgatgcgttatgaagacgtttacatgccggaagtgtacaaagccatcaacatcgcgcagaacactgcgtggaaaatcaacaaaaaggtgttagctgtggcgaacgtaattacaaaatggaagcactgcccggttgaggacatcccggctattgaacgtgaagagctgccaatgaaaccagaggacattgacatgaatccggaggcgctgaccgcatggaaacgtgcggcagcagcggtctatcgtaaggataaagccagaaagagccgtcgtatctccctggaattcatgcttgagcaggcgaacaaattcgctaaccacaaagccatctggtttccgtataatatggattggcgtggtcgtgtttacgcggtatcgatgttcaacccgcagggtaatgacatgaccaagggtttgttgaccttggccaaaggtaaaccgattggcaaagaaggttactattggttgaagatccacggtgcgaactgcgcaggggtggataaggtaccgttcccggaacgtattaaattcatcgaggaaaaccacgaaaacattatggcgtgcgcaaagagcccgctggaaaacacgtggtgggcagagcaggacagtccattctgcttcttggcgttctgtttcgaatatgcaggtgtccagcaccacggcctgagctataactgcagcctgccgctggcctttgatggttcttgtagcggtattcaacactttagcgccatgctgcgcgatgaggttggtggcagagcagtgaatctgctgccaagcgaaaccgtgcaagatatctatggcattgtggctaagaaggttaatgaaatcctgcaagcagacgcgattaacggcacggacaacgaggttgtcaccgtgaccgatgaaaacaccggtgagatctcggagaaagtgaaactgggcaccaaagccttggctggccaatggctggcatacggcgttactcgctccgtgaccaagcgttcggtgatgacccttgcttacggcagcaaagagtttggtttccgccaacaggttctggaggatactatccaaccggccatcgactctggtaaaggcctgatgttcacgcagccgaatcaggcagcgggctatatggcgaagctgatttgggaatcggttagcgttaccgttgttgcagcggtggaggctatgaactggctgaaatctgcggcgaagctgttagctgcggaggtgaaggacaagaagacgggcgaaatcctgcgtaagcgctgcgcagtgcattgggttacgccggatggttttccggtatggcaggagtacaaaaagcctattcagacccgtctgaacctgatgtttctgggtcaatttcgtctgcagccgacgatcaacaccaataaggactccgagatcgacgcgcacaaacaggagtctggcatcgcacccaatttcgttcactcacaggacggttcccatctgcgtaagaccgtcgtgtgggcacacgagaagtatggcattgagtcgtttgcattgatccacgattcctttggtaccatcccggcggacgctgcgaacctgtttaaagcggttcgcgaaaccatggttgacacctatgaaagttgcgatgttctggcagacttttatgatcagttcgccgaccaactgcatgagtcccagctggataaaatgccggcgttaccggcgaagggcaacttaaatctccgcgacatcctggaatctgatttcgccttcgcgtaa

SEQ ID NO: 183 - DNA, 2649 bp, synthetic construct
  source 1..2649: mol_type = other DNA
atgaatacaattaacatagctaaaaatgatttcagcgatattgaactggctgcgatcccgtttaataccttggcggaccattatggtgagcgtctggcgcgtgagcaacttgctctggagcacgaatcctacgagatgggtgaagcgcgtttccggaagatgttcgagcgccagcttaaggctggcgaggtggcggataacgctgctgcgaagccgttgattacgaccctgctgccgaaaatgattgcgcgtattaacgattggttcgaggaagtgaaagcaaagcgtggtaaacgtccaaccgcattccagtttctgcaagagatcaagccggaggcggtggcatacattacgatcaaaaccactctcgcatgtctcaccagcgcggataatactacggtccaagcggtggccagcgcgattggccgcgcgattgaggacgaagcgcgttttggtcgcattcgtgacctggaagcgaaacattttaagaagaacgttgaagaacaattgaattgtgtgggccacgtttacaagaaagcgttcatgcaagtcgttgaagctgatatgctgagcaaaggcctgttaggtggtgaagcatggagcagctggcataaggaggactcaattcacgtcggcgtgcggtgcattgaaatgctgatcgaatcgaccggtatggttagcctgcatcgccaaaacgccggcgtggtgggtcaagatagcgaaacgattgaactggcgccagagtacgcggaagctatcgctaccagagccggcgcattggcggggatcagcccgatgttccagccgtgtgttgtaccaccgaagccgtggaccggtatcaccggtggaggttactgggcgaatggtagacgtccgttggcgttggttcgtacccatagcaaaaaggctctgatgcgttatgaagacgtttacatgccggaagtgtacaaagccatcaacatcgcgcagaacactgcgtggaaaatcaacaaaaaggtgttagctgtggcgaacgtaattacaaaatggaagcactgcccggttgaggacatcccggctattgaacgtgaagagctgccaatgaaaccagaggacattgacatgaatccggaggcgctgaccgcatggaaacgtgcggcagcagcggtctatcgtaaggataaagccagaaagagccgtcgtatctccctggaattcatgcttgagcaggcgaacaaattcgctaaccacaaagccatctggtttccgtataatatggattggcgtggtcgtgtttacgcggtatcgatgttcaacccgcagggtaatgacatgaccaagggtttgttgaccttggccaaaggtaaaccgattggcaaagaaggttactattggttgaagatccacggtgcgaactgcgcaggggtggataaggtaccgttcccggaacgtattaaattcatcgaggaaaaccacgaaaacattatggcgtgcgcaaagagcccgctggaaaacacgtggtgggcagagcaggacagtccattctgcttcttggcgttctgtttcgaatatgcaggtgtccagcaccacggcctgagctataactgcagcctgccgctggcctttgatggttcttgtagcggtattcaacactttagcgccatgctgcgcgatgaggttggtggcagagcagtgaatctgctgccaagcgaaaccgtgcaagatatctatggcattgtggctaagaaggttaatgaaatcctgcaagcagacgcgattaacggcacggacaacgaggttgtcaccgtgaccgatgaaaacaccggtgagatctcggagaaagtgaaactgggcaccaaagccttggctggccaatggctggcatacggcgttactcgctccgtgaccaagcgttcggtgatgacccttgcttacggcagcaaagagtttggtttccgccaacaggttctggaggatactatccaaccggccatcgactctggtaaaggcctgatgttcacgcagccgaatcaggcagcgggctatatggcgaagctgatttgggaatcggttagcgttaccgttgttgcagcggtggaggctatgaactggctgaaatctgcggcgaagctgttagctgcggaggtgaaggacaagaagacgggcgaaatcctgcgtaagcgctgcgcagtgcattgggttacgccggatggttttccggtatggcaggagtacaaaaagcctattcagacccgtctgaacctgatgtttctgggtcaatttcgtctgcagccgacgatcaacaccaataaggactccgagatcgacgcgcacaaacaggagtctggcatcgcacccaatttcgttcactcacaggacggttcccatctgcgtaagaccgtcgtgtgggcacacgagaagtatggcattgagtcgtttgcattgatccacgattcctttggtaccatcccggcggacgctgcgaacctgtttaaagcggttcgcgaaaccatggttgacacctatgaaagttgcgatgttctggcagacttttatgatcagttcgccgaccaactgcatgagtcccagctggataaaatgccggcgttaccggcgaagggcaacttaaatctccgcgacatcctggaatctgatttcgccttcgcgtaa

SEQ ID NO: 184 - DNA, 2649 bp, synthetic construct
  source 1..2649: mol_type = other DNA
atgaatacaattaacatagctaaaaatgatttcagcgatattgaactggctgcgatcccgtttaataccttggcggaccattatggtgagcgtctggcgcgtgagcaacttgctctggagcacgaatcctacgagatgggtgaagcgcgtttccggaagatgttcgagcgccagcttaaggctggcgaggtggcggataacgctgctgcgaagccgttgattacgaccctgctgccgaaaatgattgcgcgtattaacgattggttcgaggaagtgaaagcaaagcgtggtaaacgtccaaccgcattccagtttctgcaagagatcaagccggaggcggtggcatacattacgatcaaaaccactctcgcatgtctcaccagcgcggataatactacggtccaagcggtggccagcgcgattggccgcgcgattgaggacgaagcgcgttttggtcgcattcgtgacctggaagcgaaacattttaagaagaacgttgaagaacaattgaatggagtgggccacgtttacaagaaagcgttcatgcaagtcgttgaagctgatatgctgagcaaaggcctgttaggtggtgaagcatggagcagctggcataaggaggactcaattcacgtcggcgtgcggtgcattgaaatgctgatcgaatcgaccggtatggttagcctgcatcgccaaaacgccggcgtggtgggtcaagatagcgaaacgattgaactggcgccagagtacgcggaagctatcgctaccagagccggcgcattggcggggatcagcccgatgttccagccgtgtgttgtaccaccgaagccgtggaccggtatcaccggtggaggttactgggcgaatggtagacgtccgttggcgttggttcgtacccatagcaaaaaggctctgatgcgttatgaagacgtttacatgccggaagtgtacaaagccatcaacatcgcgcagaacactgcgtggaaaatcaacaaaaaggtgttagctgtggcgaacgtaattacaaaatggaagcactgcccggttgaggacatcccggctattgaacgtgaagagctgccaatgaaaccagaggacattgacatgaatccggaggcgctgaccgcatggaaacgtgcggcagcagcggtctatcgtaaggataaagccagaaagagccgtcgtatctccctggaattcatgcttgagcaggcgaacaaattcgctaaccacaaagccatctggtttccgtataatatggattggcgtggtcgtgtttacgcggtatcgatgttcaacccgcagggtaatgacatgaccaagggtttgttgaccttggccaaaggtaaaccgattggcaaagaaggttactattggttgaagatccacggtgcgaactgcgcaggggtggataaggtaccgttcccggaacgtattaaattcatcgaggaaaaccacgaaaacattatggcgtgcgcaaagagcccgctggaaaacacgtggtgggcagagcaggacagtccattctgcttcttggcgttctgtttcgaatatgcaggtgtccagcaccacggcctgagctataactgcagcctgccgctggcctttgatggttcttgtagcggtattcaacactttagcgccatgctgcgcgatgaggttggtggcagagcagtgaatctgctgccaagcgaaaccgtgcaagatatctatggcattgtggctaagaaggttaatgaaatcctgcaagcagacgcgattaacggcacggacaacgaggttgtcaccgtgaccgatgaaaacaccggtgagatctcggagaaagtgaaactgggcaccaaagccttggctggccaatggctggcatacggcgttactcgctccgtgaccaagcgttcggtgatgacccttgcttacggcagcaaagagtttggtttccgccaacaggttctggaggatactatccaaccggccatcgactctggtaaaggcctgatgttcacgcagccgaatcaggcagcgggctatatggcgaagctgatttgggaatcggttagcgttaccgttgttgcagcggtggaggctatgaactggctgaaatctgcggcgaagctgttagctgcggaggtgaaggacaagaagacgggcgaaatcctgcgtaagcgctgcgcagtgcattgggttacgccggatggttttccggtatggcaggagtacaaaaagcctattcagacccgtctgaacctgatgtttctgggtcaatttcgtctgcagccgacgatcaacaccaataaggactccgagatcgacgcgcacaaacaggagtctggcatcgcacccaatttcgttcactcacaggacggttcccatctgcgtaagaccgtcgtgtgggcacacgagaagtatggcattgagtcgtttgcattgatccacgattcctttggtaccatcccggcggacgctgcgaacctgtttaaagcggttcgcgaaaccatggttgacacctatgaaagttgcgatgttctggcagacttttatgatcagttcgccgaccaactgcatgagtcccagctggataaaatgccggcgttaccggcgaagggcaacttaaatctccgcgacatcctggaatctgatttcgccttcgcgtaa

SEQ ID NO: 185 - DNA, 2649 bp, synthetic construct
  source 1..2649: mol_type = other DNA
atgaatacaattaacatagctaaaaatgatttcagcgatattgaactggctgcgatcccgtttaataccttggcggaccattatggtgagcgtctggcgcgtgagcaacttgctctggagcacgaatcctacgagatgggtgaagcgcgtttccggaagatgttcgagcgccagcttaaggctggcgaggtggcggataacgctgctgcgaagccgttgattacgaccctgctgccgaaaatgattgcgcgtattaacgattggttcgaggaagtgaaagcaaagcgtggtaaacgtccaaccgcattccagtttctgcaagagatcaagccggaggcggtggcatacattacgatcaaaaccactctcgcatgtctcaccagcgcggaaaatactacggtccaagcggtggccagcgcgattggccgcgcgattgaggacgaagcgcgttttggtcgcattcgtgacctggaagcgaaacattttaagaagaacgttgaagaacaattgaatcgcgtgggccacgtttacaagaaagcgttcatgcaagtcgttgaagctgatatgctgagcaaaggcctgttaggtggtgaagcatggagcagctggcataaggaggactcaattcacgtcggcgtgcggtgcattgaaatgctgatcgaatcgaccggtatggttagcctgcatcgccaaaacgccggcgtggtgggtcaagatagcgaaacgattgaactggcgccagagtacgcggaagctatcgctaccagagccggcgcattggcggggatcagcccgatgttccagccgtgtgttgtaccaccgaagccgtggaccggtatcaccggtggaggttactgggcgaatggtagacgtccgttggcgttggttcgtacccatagcaaaaaggctctgatgcgttatgaagacgtttacatgccggaagtgtacaaagccatcaacatcgcgcagaacactgcgtggaaaatcaacaaaaaggtgttagctgtggcgaacgtaattacaaaatggaagcactgcccggttgaggacatcccggctattgaacgtgaagagctgccaatgaaaccagaggacattgacatgaatccggaggcgctgaccgcatggaaacgtgcggcagcagcggtctatcgtaaggataaagccagaaagagccgtcgtatctccctggaattcatgcttgagcaggcgaacaaattcgctaaccacaaagccatctggtttccgtataatatggattggcgtggtcgtgtttacgcggtatcgatgttcaacccgcagggtaatgacatgaccaagggtttgttgaccttggccaaaggtaaaccgattggcaaagaaggttactattggttgaagatccacggtgcgaactgcgcaggggtggataaggtaccgttcccggaacgtattaaattcatcgaggaaaaccacgaaaacattatggcgtgcgcaaagagcccgctggaaaacacgtggtgggcagagcaggacagtccattctgcttcttggcgttctgtttcgaatatgcaggtgtccagcaccacggcctgagctataactgcagcctgccgctggcctttgatggttcttgtagcggtattcaacactttagcgccatgctgcgcgatgaggttggtggcagagcagtgaatctgctgccaagcgaaaccgtgcaagatatctatggcattgtggctaagaaggttaatgaaatcctgcaagcagacgcgattaacggcacggacaacgaggttgtcaccgtgaccgatgaaaacaccggtgagatctcggagaaagtgaaactgggcaccaaagccttggctggccaatggctggcatacggcgttactcgctccgtgaccaagcgttcggtgatgacccttgcttacggcagcaaagagtttggtttccgccaacaggttctggaggatactatccaaccggccatcgactctggtaaaggcctgatgttcacgcagccgaatcaggcagcgggctatatggcgaagctgatttgggaatcggttagcgttaccgttgttgcagcggtggaggctatgaactggctgaaatctgcggcgaagctgttagctgcggaggtgaaggacaagaagacgggcgaaatcctgcgtaagcgctgcgcagtgcattgggttacgccggatggttttccggtatggcaggagtacaaaaagcctattcagacccgtctgaacctgatgtttctgggtcaatttcgtctgcagccgacgatcaacaccaataaggactccgagatcgacgcgcacaaacaggagtctggcatcgcacccaatttcgttcactcacaggacggttcccatctgcgtaagaccgtcgtgtgggcacacgagaagtatggcattgagtcgtttgcattgatccacgattcctttggtaccatcccggcggacgctgcgaacctgtttaaagcggttcgcgaaaccatggttgacacctatgaaagttgcgatgttctggcagacttttatgatcagttcgccgaccaactgcatgagtcccagctggataaaatgccggcgttaccggcgaagggcaacttaaatctccgcgacatcctggaatctgatttcgccttcgcgtaa

SEQ ID NO: 186 - DNA, 2649 bp, synthetic construct
  source 1..2649: mol_type = other DNA
atgaatacaattaacatagctaaaaatgatttcagcgatattgaactggctgcgatcccgtttaataccttggcggaccattatggtgagcgtctggcgcgtgagcaacttgctctggagcacgaatcctacgagatgggtgaagcgcgtttccggaagatgttcgagcgccagcttaaggctggcgaggtggcggataacgctgctgcgaagccgttgattacgaccctgctgccgaaaatgattgcgcgtattaacgattggttcgaggaagtgaaagcaaagcgtggtaaacgtccaaccgcattccagtttctgcaagagatcaagccggaggcggtggcatacattacgatcaaaaccactctcgcatgtctcaccagcgcggataatactacggtccaagcggtggccagcgcgattggccgcgcgattgaggacgaagcgcgttttggtcgcattcgtgacctggaagcgaaacattttaagaagaacgttgaagaacaattgaatcgcgtgggccacgtttacaagaaagcgttcatgcaagtcgttgaagctgatatgctgagcaaaggcctgttaggtggtgaagcatggagcagctggcataaggaggactcaattcacgtcggcgtgcggtgcattgaaatgctgatcgaatcgaccggtatggttagcctgcatcgccaaaacgccggcgtggtgggtcaagatagcgaaacgattgaactggcgccagagtacgcggaagctatcgctaccagagccggcgcattggcggggatcagcccgatgttccagccgtgtgttgtaccaccgaagccgtggaccggtatcaccggtggaggttactgggcgaatggtagacgtccgttggcgttggttcgtacccatagcaaaaaggctctgatgcgttatgaagacgtttacatgccggaagtgtacaaagccatcaacatcgcgcagaacactgcgtggaaaatcaacaaaaaggtgttagctgtggcgaacgtaattacaaaatggaagcactgcccggttgaggacatcccggctattgaacgtgaagagctgccaatgaaaccagaggacattgacatgaatccggaggcgctgaccgcatggaaacgtgcggcagcagcggtctatcgtagtgataaagccagaaagagccgtcgtatctccctggaattcatgcttgagcaggcgaacaaattcgctaaccacaaagccatctggtttccgtataatatggattggcgtggtcgtgtttacgcggtatcgatgttcaacccgcagggtaatgacatgaccaagggtttgttgaccttggccaaaggtaaaccgattggcaaagaaggttactattggttgaagatccacggtgcgaactgcgcaggggtggataaggtaccgttcccggaacgtattaaattcatcgaggaaaaccacgaaaacattatggcgtgcgcaaagagcccgctggaaaacacgtggtgggcagagcaggacagtccattctgcttcttggcgttctgtttcgaatatgcaggtgtccagcaccacggcctgagctataactgcagcctgccgctggcctttgatggttcttgtagcggtattcaacactttagcgccatgctgcgcgatgaggttggtggcagagcagtgaatctgctgccaagcgaaaccgtgcaagatatctatggcattgtggctaagaaggttaatgaaatcctgcaagcagacgcgattaacggcacggacaacgaggttgtcaccgtgaccgatgaaaacaccggtgagatctcggagaaagtgaaactgggcaccaaagccttggctggccaatggctggcatacggcgttactcgctccgtgaccaagcgttcggtgatgacccttgcttacggcagcaaagagtttggtttccgccaacaggttctggaggatactatccaaccggccatcgactctggtaaaggcctgatgttcacgcagccgaatcaggcagcgggctatatggcgaagctgatttgggaatcggttagcgttaccgttgttgcagcggtggaggctatgaactggctgaaatctgcggcgaagctgttagctgcggaggtgaaggacaagaagacgggcgaaatcctgcgtaagcgctgcgcagtgcattgggttacgccggatggttttccggtatggcaggagtacaaaaagcctattcagacccgtctgaacctgatgtttctgggtcaatttcgtctgcagccgacgatcaacaccaataaggactccgagatcgacgcgcacaaacaggagtctggcatcgcacccaatttcgttcactcacaggacggttcccatctgcgtaagaccgtcgtgtgggcacacgagaagtatggcattgagtcgtttgcattgatccacgattcctttggtaccatcccggcggacgctgcgaacctgtttaaagcggttcgcgaaaccatggttgacacctatgaaagttgcgatgttctggcagacttttatgatcagttcgccgaccaactgcatgagtcccagctggataaaatgccggcgttaccggcgaagggcaacttaaatctccgcgacatcctggaatctgatttcgccttcgcgtaa

SEQ ID NO: 187 - DNA, 2649 bp, synthetic construct
  source 1..2649: mol_type = other DNA
atgaatacaattaacatagctaaaaatgatttcagcgatattgaactggctgcgatcccgtttaataccttggcggaccattatggtgagcgtctggcgcgtgagcaacttgctctggagcacgaatcctacgagatgggtgaagcgcgtttccggaagatgttcgagcgccagcttaaggctggcgaggtggcggataacgctgctgcgaagccgttgattacgaccctgctgccgaaaatgattgcgcgtattaacgattggttcgaggaagtgaaagcaaagcgtggtaaacgtccaaccgcattccagtttctgcaagagatcaagccggaggcggtggcatacattacgatcaaaaccactctcgcatgtctcaccagcgcggataatactacggtccaagcggtggccagcgcgattggccgcgcgattgaggacgaagcgcgttttggtcgcattcgtgacctggaagcgaaacattttaagaagaacgttgaagaacaattgaatcgcgtgggccacgtttacaagaaagcgttcatgcaagtcgttgaagctgatatgctgagcaaaggcctgttaggtggtgaagcatggagcagctggcataaggaggactcaattcacgtcggcgtgcggtgcattgaaatgctgatcgaatcgaccggtatggttagcctgcatcgccaaaacgccggcgtggtgggtcaagatagcgaaacgattgaactggcgccagagtacgcggaagctatcgctaccagagccggcgcattggcggggatcagcccgatgttccagccgtgtgttgtaccaccgaagccgtggaccggtatcaccggtggaggttactgggcgaatggtagacgtccgttggcgttggttcgtacccatagcaaaaaggctctgatgcgttatgaagacgtttacatgccggaagtgtacaaagccatcaacatcgcgcagaacactgcgtggaaaatcaacaaaaaggtgttagctgtggcgaacgtaattacaaaatggaagcactgcccggttgaggacatcccggctattgaacgtgaagagctgccaatgaaaccagaggacattgacatgaatccggaggcgctgaccgcatggaaacgtgcggcagcagcggtctatcgttacgataaagccagaaagagccgtcgtatctccctggaattcatgcttgagcaggcgaacaaattcgctaaccacaaagccatctggtttccgtataatatggattggcgtggtcgtgtttacgcggtatcgatgttcaacccgcagggtaatgacatgaccaagggtttgttgaccttggccaaaggtaaaccgattggcaaagaaggttactattggttgaagatccacggtgcgaactgcgcaggggtggataaggtaccgttcccggaacgtattaaattcatcgaggaaaaccacgaaaacattatggcgtgcgcaaagagcccgctggaaaacacgtggtgggcagagcaggacagtccattctgcttcttggcgttctgtttcgaatatgcaggtgtccagcaccacggcctgagctataactgcagcctgccgctggcctttgatggttcttgtagcggtattcaacactttagcgccatgctgcgcgatgaggttggtggcagagcagtgaatctgctgccaagcgaaaccgtgcaagatatctatggcattgtggctaagaaggttaatgaaatcctgcaagcagacgcgattaacggcacggacaacgaggttgtcaccgtgaccgatgaaaacaccggtgagatctcggagaaagtgaaactgggcaccaaagccttggctggccaatggctggcatacggcgttactcgctccgtgaccaagcgttcggtgatgacccttgcttacggcagcaaagagtttggtttccgccaacaggttctggaggatactatccaaccggccatcgactctggtaaaggcctgatgttcacgcagccgaatcaggcagcgggctatatggcgaagctgatttgggaatcggttagcgttaccgttgttgcagcggtggaggctatgaactggctgaaatctgcggcgaagctgttagctgcggaggtgaaggacaagaagacgggcgaaatcctgcgtaagcgctgcgcagtgcattgggttacgccggatggttttccggtatggcaggagtacaaaaagcctattcagacccgtctgaacctgatgtttctgggtcaatttcgtctgcagccgacgatcaacaccaataaggactccgagatcgacgcgcacaaacaggagtctggcatcgcacccaatttcgttcactcacaggacggttcccatctgcgtaagaccgtcgtgtgggcacacgagaagtatggcattgagtcgtttgcattgatccacgattcctttggtaccatcccggcggacgctgcgaacctgtttaaagcggttcgcgaaaccatggttgacacctatgaaagttgcgatgttctggcagacttttatgatcagttcgccgaccaactgcatgagtcccagctggataaaatgccggcgttaccggcgaagggcaacttaaatctccgcgacatcctggaatctgatttcgccttcgcgtaa

SEQ ID NO: 188 - DNA, 2649 bp, synthetic construct
  source 1..2649: mol_type = other DNA
atgaatacaattaacatagctaaaaatgatttcagcgatattgaactggctgcgatcccgtttaataccttggcggaccattatggtgagcgtctggcgcgtgagcaacttgctctggagcacgaatcctacgagatgggtgaagcgcgtttccggaagatgttcgagcgccagcttaaggctggcgaggtggcggataacgctgctgcgaagccgttgattacgaccctgctgccgaaaatgattgcgcgtattaacgattggttcgaggaagtgaaagcaaagcgtggtaaacgtccaaccgcattccagtttctgcaagagatcaagccggaggcggtggcatacattacgatcaaaaccactctcgcatgtctcaccagcgcggataatactacggtccaagcggtggccagcgcgattggccgcgcgattgaggacgaagcgcgttttggtcgcattcgtgacctggaagcgaaacattttaagaagaacgttgaagaacaattgaatcgcgtgggccacgtttacaagaaagcgttcatgcaagtcgttgaagctgatatgctgagcaaaggcctgttaggtggtgaagcatggagcagctggcataaggaggactcaattcacgtcggcgtgcggtgcattgaaatgctgatcgaatcgaccggtatggttagcctgcatcgccaaaacgccggcgtggtgggtcaagatagcgaaacgattgaactggcgccagagtacgcggaagctatcgctaccagagccggcgcattggcggggatcagcccgatgttccagccgtgtgttgtaccaccgaagccgtggaccggtatcaccggtggaggttactgggcgaatggtagacgtccgttggcgttggttcgtacccatagcaaaaaggctctgatgcgttatgaagacgtttacatgccggaagtgtacaaagccatcaacatcgcgcagaacactgcgtggaaaatcaacaaaaaggtgttagctgtggcgaacgtaattacaaaatggaagcactgcccggttgaggacatcccggctattgaacgtgaagagctgccaatgaaaccagaggacattgacatgaatccggaggcgctgaccgcatggaaacgtgcggcagcagcggtctatcgtaaggataaagccagaaagagccgtcgtatctccctggaattcatgcttgagcaggcgaacaaattcgctaaccacaaagccatctggtttccgtataatatggattggcgtggtcgtgtttacgcggtatcgatgttcaacccgcagggtaatgacatgaccaagggtttgttgaccttggccaaaggtaaaccgattggcaaagaaggttactattggttgaagatccacggtgcgaactgcgcaggggtggataaggtaccgttcccggaacgtattaaattcatcgaggaaaaccacgaaaacattatggcgtgcgcaaagagcccgctggaaaacacgtggtgggcagagcaggacagtccattctgcttcttggcgttctgtttcgaatatgcaggtgtccagcaccacggcctgagctataactgcagcctgccgctggcctttgatggttcttgtagcggtattcaacactttagcgccatgctgcgcgatgaggttggtggcagagcagtgaatctgctgccaagcgaaaccgtgcaagatatctatggcattgtggctaagaaggttaatgaaatcctgcaagcagacgcgattaacggcacggacaacgaggttgtcaccgtgaccgatgaaaacaccggtgagatctcggagaaagtgaaactgggcaccaaagccttggctggccaatggctggcatacggcgttactcgctccgtgaccaagcgttcggtgatgacccttgcttacggcagcaaagagtttggtttccgccaacaggttctggaggatactatccaaccggccatcgactctggtaaaggcctgatgttcacgcagccgaatcaggcagcgggctatatggcgaagctgatttgggaatcggttagcgttaccgttgttgcagcggtggaggctatgaactggctgaaatctgcggcgaagctgttagctgcggaggtgaaggacaagaagacgggcgaaatcctgcgtaagcgctgcgcagtgcattgggttacgccggatggttttccggtatggcaggagtacaaaaagcctattcagacccgtctgaacctgatgtttctgggtcaatttcgtctgcagccgacgatcaacaccaataaggactccgagatcgacgcgcacaaacaggagtctggcatcgcacccaatttcgttcactcacaggacggttcccatctgcgtaagaccgtcgtgtgggcacacgagaagtatggcattgagtcgtttgcattgatccacgattcctttggtaccatcccggcggacgctgcgaacctgtttaaagcggttcgcgaaaccatggttgacacctatgaaagttgcgatgttctggcagacttttatgatcagttcgccgaccaactgcatgagtcccagctggataaaatgccggcgttaccggcgaagggcaacttaaatctccgcgacatcctggaatctgatgccgccttcgcgtaa

SEQ ID NO: 189 - DNA, 2652 bp, synthetic construct
  source 1..2652: mol_type = other DNA
atgaatacaattaacatagctaaaaatgatttcagcgatattgaactggctgcgatcccgtttaataccttggcggaccattatggtgagcgtctggcgcgtgagcaacttgctctggagcacgaatcctacgagatgggtgaagcgcgtttccggaagatgttcgagcgccagcttaaggctggcgaggtggcggataacgctgctgcgaagccgttgattacgaccctgctgccgaaaatgattgcgcgtattaacgattggttcgaggaagtgaaagcaaagcgtggtaaacgtccaaccgcattccagtttctgcaagagatcaagccggaggcggtggcatacattacgatcaaaaccactctcgcatgtctcaccagcgcggataatactacggtccaagcggtggccagcgcgattggccgcgcgattgaggacgaagcgcgttttggtcgcattcgtgacctggaagcgaaacattttaagaagaacgttgaagaacaattgaataaacgcgtgggccacgtttacaagaaagcgttcatgcaagtcgttgaagctgatatgctgagcaaaggcctgttaggtggtgaagcatggagcagctggcataaggaggactcaattcacgtcggcgtgcggtgcattgaaatgctgatcgaatcgaccggtatggttagcctgcatcgccaaaacgccggcgtggtgggtcaagatagcgaaacgattgaactggcgccagagtacgcggaagctatcgctaccagagccggcgcattggcggggatcagcccgatgttccagccgtgtgttgtaccaccgaagccgtggaccggtatcaccggtggaggttactgggcgaatggtagacgtccgttggcgttggttgctacccatagcaaaaaggctctgatgcgttatgaagacgtttacatgccggaagtgtacaaagccatcaacatcgcgcagaacactgcgtggaaaatcaacaaaaaggtgttagctgtggcgaacgtaattacaaaatggaagcactgcccggttgaggacatcccggctattgaacgtgaagagctgccaatgaaaccagaggacattgacatgaatccggaggcgctgaccgcatggaaacgtgcggcagcagcggtctatcgtaaggataaagccagaaagagccgtcgtatctccctggaattcatgcttgagcaggcgaacaaattcgctaaccacaaagccatctggtttccgtataatatggattggcgtggtcgtgtttacgcggtatcgatgttcaacccgcagggtaatgacatgaccaagggtttgttgaccttggccaaaggtaaaccgattggcaaagaaggttactattggttgaagatccacggtgcgaactgcgcaggggtggataaggtaccgttcccggaacgtattaaattcatcgaggaaaaccacgaaaacattatggcgtgcgcaaagagcccgctggaaaacacgtggtgggcagagcaggacagtccattctgcttcttggcgttctgtttcgaatatgcaggtgtccagcaccacggcctgagctataactgcagcctgccgctggcctttgatggttcttgtagcggtattcaacactttagcgccatgctgcgcgatgaggttggtggcagagcagtgaatctgctgccaagcgaaaccgtgcaagatatctatggcattgtggctaagaaggttaatgaaatcctgcaagcagacgcgattaacggcacggacaacgaggttgtcaccgtgaccgatgaaaacaccggtgagatctcggagaaagtgaaactgggcaccaaagccttggctggccaatggctggcatacggcgttactcgctccgtgaccaagcgttcggtgatgacccttgcttacggcagcaaagagtttggtttccgccaacaggttctggaggatactatccaaccggccatcgactctggtaaaggcctgatgttcacgcagccgaatcaggcagcgggctatatggcgaagctgatttgggaatcggttagcgttaccgttgttgcagcggtggaggctatgaactggctgaaatctgcggcgaagctgttagctgcggaggtgaaggacaagaagacgggcgaaatcctgcgtaagcgctgcgcagtgcattgggttacgccggatggttttccggtatggcaggagtacaaaaagcctattcagacccgtctgaacctgatgtttctgggtcaatttcgtctgcagccgacgatcaacaccaataaggactccgagatcgacgcgcacaaacaggagtctggcatcgcacccaatttcgttcactcacaggacggttcccatctgcgtaagaccgtcgtgtgggcacacgagaagtatggcattgagtcgtttgcattgatccacgattcctttggtaccatcccggcggacgctgcgaacctgtttaaagcggttcgcgaaaccatggttgacacctatgaaagttgcgatgttctggcagacttttatgatcagttcgccgaccaactgcatgagtcccagctggataaaatgccggcgttaccggcgaagggcaacttaaatctccgcgacatcctggaatctgatttcgccttcgcgtaa

SEQ ID NO: 190 - DNA, 2652 bp, synthetic construct
  source 1..2652: mol_type = other DNA
atgaatacaattaacatagctaaaaatgatttcagcgatattgaactggctgcgatcccgtttaataccttggcggaccattatggtgagcgtctggcgcgtgagcaacttgctctggagcacgaatcctacgagatgggtgaagcgcgtttccggaagatgttcgagcgccagcttaaggctggcgaggtggcggataacgctgctgcgaagccgttgattacgaccctgctgccgaaaatgattgcgcgtattaacgattggttcgaggaagtgaaagcaaagcgtggtaaacgtccaaccgcattccagtttctgcaagagatcaagccggaggcggtggcatacattacgatcaaaaccactctcgcatgtctcaccagcgcggataatactacggtccaagcggtggccagcgcgattggccgcgcgattgaggacgaagcgcgttttggtcgcattcgtgacctggaagcgaaacattttaagaagaacgttgaagaacaattgaataaacgcgtgggccacgtttacaagaaagcgttcatgcaagtcgttgaagctgatatgctgagcaaaggcctgttaggtggtgaagcatggagcagctggcataaggaggactcaattcacgtcggcgtgcggtgcattgaaatgctgatcgaatcgaccggtatggttagcctgcatcgccaaaacgccggcgtggtgggtcaagatagcgaaacgattgaactggcgccagagtacgcggaagctatcgctaccagagccggcgcattggcggggatcagcccgatgttccagccgtgtgttgtaccaccgaagccgtggaccggtatcaccggtggaggttactgggcgaatggtagacgtccgttggcgttggttcgtacccatagcaaaaaggctctgatgcgttatgaagacgtttacatgccggaagtgtacaaagccatcaacatcgcgcagaacactgcgtggaaaatcaacaaaaaggtgttagctgtggcgaacgtaattacaaaatggaagcactgcccggttgaggacatcccggctattgaacgtgaagagctgccaatgaaaccagaggacattgacatgaatccggaggcgctgaccgcatggaaacgtgcggcagcagcggtcgaacgtaaggataaagccagaaagagccgtcgtatctccctggaattcatgcttgagcaggcgaacaaattcgctaaccacaaagccatctggtttccgtataatatggattggcgtggtcgtgtttacgcggtatcgatgttcaacccgcagggtaatgacatgaccaagggtttgttgaccttggccaaaggtaaaccgattggcaaagaaggttactattggttgaagatccacggtgcgaactgcgcaggggtggataaggtaccgttcccggaacgtattaaattcatcgaggaaaaccacgaaaacattatggcgtgcgcaaagagcccgctggaaaacacgtggtgggcagagcaggacagtccattctgcttcttggcgttctgtttcgaatatgcaggtgtccagcaccacggcctgagctataactgcagcctgccgctggcctttgatggttcttgtagcggtattcaacactttagcgccatgctgcgcgatgaggttggtggcagagcagtgaatctgctgccaagcgaaaccgtgcaagatatctatggcattgtggctaagaaggttaatgaaatcctgcaagcagacgcgattaacggcacggacaacgaggttgtcaccgtgaccgatgaaaacaccggtgagatctcggagaaagtgaaactgggcaccaaagccttggctggccaatggctggcatacggcgttactcgctccgtgaccaagcgttcggtgatgacccttgcttacggcagcaaagagtttggtttccgccaacaggttctggaggatactatccaaccggccatcgactctggtaaaggcctgatgttcacgcagccgaatcaggcagcgggctatatggcgaagctgatttgggaatcggttagcgttaccgttgttgcagcggtggaggctatgaactggctgaaatctgcggcgaagctgttagctgcggaggtgaaggacaagaagacgggcgaaatcctgcgtaagcgctgcgcagtgcattgggttacgccggatggttttccggtatggcaggagtacaaaaagcctattcagacccgtctgaacctgatgtttctgggtcaatttcgtctgcagccgacgatcaacaccaataaggactccgagatcgacgcgcacaaacaggagtctggcatcgcacccaatttcgttcactcacaggacggttcccatctgcgtaagaccgtcgtgtgggcacacgagaagtatggcattgagtcgtttgcattgatccacgattcctttggtaccatcccggcggacgctgcgaacctgtttaaagcggttcgcgaaaccatggttgacacctatgaaagttgcgatgttctggcagacttttatgatcagttcgccgaccaactgcatgagtcccagctggataaaatgccggcgttaccggcgaagggcaacttaaatctccgcgacatcctggaatctgatttcgccttcgcgtaa

SEQ ID NO: 191 - DNA, 2652 bp, synthetic construct
  source 1..2652: mol_type = other DNA
atgaatacaattaacatagctaaaaatgatttcagcgatattgaactggctgcgatcccgtttaataccttggcggaccattatggtgagcgtctggcgcgtgagcaacttgctctggagcacgaatcctacgagatgggtgaagcgcgtttccggaagatgttcgagcgccagcttaaggctggcgaggtggcggataacgctgctgcgaagccgttgattacgaccctgctgccgaaaatgattgcgcgtattaacgattggttcgaggaagtgaaagcaaagcgtggtaaacgtccaaccgcattccagtttctgcaagagatcaagccggaggcggtggcatacattacgatcaaaaccactctcgcatgtctcaccagcgcggataatactacggtccaagcggtggccagcgcgattggccgcgcgattgaggacgaagcgcgttttggtcgcattcgtgacctggaagcgaaacattttaagaagaacgttgaagaacaattgaataaacgcgtgggccacgtttacaagaaagcgttcatgcaagtcgttgaagctgatatgctgagcaaaggcctgttaggtggtgaagcatggagcagctggcataaggaggactcaattcacgtcggcgtgcggtgcattgaaatgctgatcgaatcgaccggtatggttagcctgcatcgccaaaacgccggcgtggtgggtcaagatagcgaaacgattgaactggcgccagagtacgcggaagctatcgctaccagagccggcgcattggcggggatcagcccgatgttccagccgtgtgttgtaccaccgaagccgtggaccggtatcaccggtggaggttactgggcgaatggtagacgtccgttggcgttggttcgtacccatagcaaaaaggctctgatgcgttatgaagacgtttacatgccggaagtgtacaaagccatcaacatcgcgcagaacactgcgtggaaaatcaacaaaaaggtgttagctgtggcgaacgtaattacaaaatggaagcactgcccggttgaggacatcccggctattgaacgtgaagagctgccaatgaaaccagaggacattgacatgaatccggaggcgctgaccgcatggaaacgtgcggcagcagcggtctatcgtcaggataaagccagaaagagccgtcgtatctccctggaattcatgcttgagcaggcgaacaaattcgctaaccacaaagccatctggtttccgtataatatggattggcgtggtcgtgtttacgcggtatcgatgttcaacccgcagggtaatgacatgaccaagggtttgttgaccttggccaaaggtaaaccgattggcaaagaaggttactattggttgaagatccacggtgcgaactgcgcaggggtggataaggtaccgttcccggaacgtattaaattcatcgaggaaaaccacgaaaacattatggcgtgcgcaaagagcccgctggaaaacacgtggtgggcagagcaggacagtccattctgcttcttggcgttctgtttcgaatatgcaggtgtccagcaccacggcctgagctataactgcagcctgccgctggcctttgatggttcttgtagcggtattcaacactttagcgccatgctgcgcgatgaggttggtggcagagcagtgaatctgctgccaagcgaaaccgtgcaagatatctatggcattgtggctaagaaggttaatgaaatcctgcaagcagacgcgattaacggcacggacaacgaggttgtcaccgtgaccgatgaaaacaccggtgagatctcggagaaagtgaaactgggcaccaaagccttggctggccaatggctggcatacggcgttactcgctccgtgaccaagcgttcggtgatgacccttgcttacggcagcaaagagtttggtttccgccaacaggttctggaggatactatccaaccggccatcgactctggtaaaggcctgatgttcacgcagccgaatcaggcagcgggctatatggcgaagctgatttgggaatcggttagcgttaccgttgttgcagcggtggaggctatgaactggctgaaatctgcggcgaagctgttagctgcggaggtgaaggacaagaagacgggcgaaatcctgcgtaagcgctgcgcagtgcattgggttacgccggatggttttccggtatggcaggagtacaaaaagcctattcagacccgtctgaacctgatgtttctgggtcaatttcgtctgcagccgacgatcaacaccaataaggactccgagatcgacgcgcacaaacaggagtctggcatcgcacccaatttcgttcactcacaggacggttcccatctgcgtaagaccgtcgtgtgggcacacgagaagtatggcattgagtcgtttgcattgatccacgattcctttggtaccatcccggcggacgctgcgaacctgtttaaagcggttcgcgaaaccatggttgacacctatgaaagttgcgatgttctggcagacttttatgatcagttcgccgaccaactgcatgagtcccagctggataaaatgccggcgttaccggcgaagggcaacttaaatctccgcgacatcctggaatctgatttcgccttcgcgtaa

SEQ ID NO: 192 - DNA, 2652 bp, synthetic construct
  source 1..2652: mol_type = other DNA
atgaatacaattaacatagctaaaaatgatttcagcgatattgaactggctgcgatcccgtttaataccttggcggaccattatggtgagcgtctggcgcgtgagcaacttgctctggagcacgaatcctacgagatgggtgaagcgcgtttccggaagatgttcgagcgccagcttaaggctggcgaggtggcggataacgctgctgcgaagccgttgattacgaccctgctgccgaaaatgattgcgcgtattaacgattggttcgaggaagtgaaagcaaagcgtggtaaacgtccaaccgcattccagtttctgcaagagatcaagccggaggcggtggcatacattacgatcaaaaccactctcgcatgtctcaccagcgcggataatactacggtccaagcggtggccagcgcgattggccgcgcgattgaggacgaagcgcgttttggtcgcattcgtgacctggaagcgaaacattttaagaagaacgttgaagaacaattgaataaacgcgtgggccacgtttacaagaaagcgttcatgcaagtcgttgaagctgatatgctgagcaaaggcctgttaggtggtgaagcatggagcagctggcataaggaggactcaattcacgtcggcgtgcggtgcattgaaatgctgatcgaatcgaccggtatggttagcctgcatcgccaaaacgccggcgtggtgggtcaagatagcgaaacgattgaactggcgccagagtacgcggaagctatcgctaccagagccggcgcattggcggggatcagcccgatgttccagccgtgtgttgtaccaccgaagccgtggaccggtatcaccggtggaggttactgggcgaatggtagacgtccgttggcgttggttcgtacccatagcaaaaaggctctgatgcgttatgaagacgtttacatgccggaagtgtacaaagccatcaacatcgcgcagaacactgcgtggaaaatcaacaaaaaggtgttagctgtggcgaacgtaattacaaaatggaagcactgcccggttgaggacatcccggctattgaacgtgaagagctgccaatgaaaccagaggacattgacatgaatccggaggcgctgaccgcatggaaacgtgcggcagcagcggtctatcgttacgataaagccagaaagagccgtcgtatctccctggaattcatgcttgagcaggcgaacaaattcgctaaccacaaagccatctggtttccgtataatatggattggcgtggtcgtgtttacgcggtatcgatgttcaacccgcagggtaatgacatgaccaagggtttgttgaccttggccaaaggtaaaccgattggcaaagaaggttactattggttgaagatccacggtgcgaactgcgcaggggtggataaggtaccgttcccggaacgtattaaattcatcgaggaaaaccacgaaaacattatggcgtgcgcaaagagcccgctggaaaacacgtggtgggcagagcaggacagtccattctgcttcttggcgttctgtttcgaatatgcaggtgtccagcaccacggcctgagctataactgcagcctgccgctggcctttgatggttcttgtagcggtattcaacactttagcgccatgctgcgcgatgaggttggtggcagagcagtgaatctgctgccaagcgaaaccgtgcaagatatctatggcattgtggctaagaaggttaatgaaatcctgcaagcagacgcgattaacggcacggacaacgaggttgtcaccgtgaccgatgaaaacaccggtgagatctcggagaaagtgaaactgggcaccaaagccttggctggccaatggctggcatacggcgttactcgctccgtgaccaagcgttcggtgatgacccttgcttacggcagcaaagagtttggtttccgccaacaggttctggaggatactatccaaccggccatcgactctggtaaaggcctgatgttcacgcagccgaatcaggcagcgggctatatggcgaagctgatttgggaatcggttagcgttaccgttgttgcagcggtggaggctatgaactggctgaaatctgcggcgaagctgttagctgcggaggtgaaggacaagaagacgggcgaaatcctgcgtaagcgctgcgcagtgcattgggttacgccggatggttttccggtatggcaggagtacaaaaagcctattcagacccgtctgaacctgatgtttctgggtcaatttcgtctgcagccgacgatcaacaccaataaggactccgagatcgacgcgcacaaacaggagtctggcatcgcacccaatttcgttcactcacaggacggttcccatctgcgtaagaccgtcgtgtgggcacacgagaagtatggcattgagtcgtttgcattgatccacgattcctttggtaccatcccggcggacgctgcgaacctgtttaaagcggttcgcgaaaccatggttgacacctatgaaagttgcgatgttctggcagacttttatgatcagttcgccgaccaactgcatgagtcccagctggataaaatgccggcgttaccggcgaagggcaacttaaatctccgcgacatcctggaatctgatttcgccttcgcgtaa

SEQ ID NO: 193 - DNA, 2652 bp, synthetic construct
  source 1..2652: mol_type = other DNA
atgaatacaattaacatagctaaaaatgatttcagcgatattgaactggctgcgatcccgtttaataccttggcggaccattatggtgagcgtctggcgcgtgagcaacttgctctggagcacgaatcctacgagatgggtgaagcgcgtttccggaagatgttcgagcgccagcttaaggctggcgaggtggcggataacgctgctgcgaagccgttgattacgaccctgctgccgaaaatgattgcgcgtattaacgattggttcgaggaagtgaaagcaaagcgtggtaaacgtccaaccgcattccagtttctgcaagagatcaagccggaggcggtggcatacattacgatcaaaaccactctcgcatgtctcaccagcgcggataatactacggtccaagcggtggccagcgcgattggccgcgcgattgaggacgaagcgcgttttggtcgcattcgtgacctggaagcgaaacattttaagaagaacgttgaagaacaattgaataaacgcgtgggccacgtttacaagaaagcgttcatgcaagtcgttgaagctgatatgctgagcaaaggcctgttaggtggtgaagcatggagcagctggcataaggaggactcaattcacgtcggcgtgcggtgcattgaaatgctgatcgaatcgaccggtatggttagcctgcatcgccaaaacgccggcgtggtgggtcaagatagcgaaacgattgaactggcgccagagtacgcggaagctatcgctaccagagccggcgcattggcggggatcagcccgatgttccagccgtgtgttgtaccaccgaagccgtggaccggtatcaccggtggaggttactgggcgaatggtagacgtccgttggcgttggttcgtacccatagcaaaaaggctctgatgcgttatgaagacgtttacatgccggaagtgtacaaagccatcaacatcgcgcagaacactgcgtggaaaatcaacaaaaaggtgttagctgtggcgaacgtaattacaaaatggaagcactgcccggttgaggacatcccggctattgaacgtgaagagctgccaatgaaaccagaggacattgacatgaatccggaggcgctgaccgcatggaaacgtgcggcagcagcggtctatcgtagtgataaagccagaaagagccgtcgtatctccctggaattcatgcttgagcaggcgaacaaattcgctaaccacaaagccatctggtttccgtataatatggattggcgtggtcgtgtttacgcggtatcgatgttcaacccgcagggtaatgacatgaccaagggtttgttgaccttggccaaaggtaaaccgattggcaaagaaggttactattggttgaagatccacggtgcgaactgcgcaggggtggataaggtaccgttcccggaacgtattaaattcatcgaggaaaaccacgaaaacattatggcgtgcgcaaagagcccgctggaaaacacgtggtgggcagagcaggacagtccattctgcttcttggcgttctgtttcgaatatgcaggtgtccagcaccacggcctgagctataactgcagcctgccgctggcctttgatggttcttgtagcggtattcaacactttagcgccatgctgcgcgatgaggttggtggcagagcagtgaatctgctgccaagcgaaaccgtgcaagatatctatggcattgtggctaagaaggttaatgaaatcctgcaagcagacgcgattaacggcacggacaacgaggttgtcaccgtgaccgatgaaaacaccggtgagatctcggagaaagtgaaactgggcaccaaagccttggctggccaatggctggcatacggcgttactcgctccgtgaccaagcgttcggtgatgacccttgcttacggcagcaaagagtttggtttccgccaacaggttctggaggatactatccaaccggccatcgactctggtaaaggcctgatgttcacgcagccgaatcaggcagcgggctatatggcgaagctgatttgggaatcggttagcgttaccgttgttgcagcggtggaggctatgaactggctgaaatctgcggcgaagctgttagctgcggaggtgaaggacaagaagacgggcgaaatcctgcgtaagcgctgcgcagtgcattgggttacgccggatggttttccggtatggcaggagtacaaaaagcctattcagacccgtctgaacctgatgtttctgggtcaatttcgtctgcagccgacgatcaacaccaataaggactccgagatcgacgcgcacaaacaggagtctggcatcgcacccaatttcgttcactcacaggacggttcccatctgcgtaagaccgtcgtgtgggcacacgagaagtatggcattgagtcgtttgcattgatccacgattcctttggtaccatcccggcggacgctgcgaacctgtttaaagcggttcgcgaaaccatggttgacacctatgaaagttgcgatgttctggcagacttttatgatcagttcgccgaccaactgcatgagtcccagctggataaaatgccggcgttaccggcgaagggcaacttaaatctccgcgacatcctggaatctgatttcgccttcgcgtaa

SEQ ID NO: 194 - DNA, 2652 bp, synthetic construct
  source 1..2652: mol_type = other DNA
atgaatacaattaacatagctaaaaatgatttcagcgatattgaactggctgcgatcccgtttaataccttggcggaccattatggtgagcgtctggcgcgtgagcaacttgctctggagcacgaatcctacgagatgggtgaagcgcgtttccggaagatgttcgagcgccagcttaaggctggcgaggtggcggataacgctgctgcgaagccgttgattacgaccctgctgccgaaaatgattgcgcgtattaacgattggttcgaggaagtgaaagcaaagcgtggtaaacgtccaaccgcattccagtttctgcaagagatcaagccggaggcggtggcatacattacgatcaaaaccactctcgcatgtctcaccagcgcggataatactacggtccaagcggtggccagcgcgattggccgcgcgattgaggacgaagcgcgttttggtcgcattcgtgacctggaagcgaaacattttaagaagaacgttgaagaacaattgaataaacgcgtgggccacgtttacaagaaagcgttcatgcaagtcgttgaagctgatatgctgagcaaaggcctgttaggtggtgaagcatggagcagctggcataaggaggactcaattcacgtcggcgtgcggtgcattgaaatgctgatcgaatcgaccggtatggttagcctgcatcgccaaaacgccggcgtggtgggtcaagatagcgaaacgattgaactggcgccagagtacgcggaagctatcgctaccagagccggcgcattggcggggatcagcccgatgttccagccgtgtgttgtaccaccgaagccgtggaccggtatcaccggtggaggttactgggcgaatggtagacgtccgttggcgttggttcgtacccatagcaaaaaggctctgatgcgttatgaagacgtttacatgccggaagtgtacaaagccatcaacatcgcgcagaacactgcgtggaaaatcaacaaaaaggtgttagctgtggcgaacgtaattacaaaatggaagcactgcccggttgaggacatcccggctattgaacgtgaagagctgccaatgaaaccagaggacattgacatgaatccggaggcgctgaccgcatggaaacgtgcggcagcagcggtctatcgtaagcttaaagccagaaagagccgtcgtatctccctggaattcatgcttgagcaggcgaacaaattcgctaaccacaaagccatctggtttccgtataatatggattggcgtggtcgtgtttacgcggtatcgatgttcaacccgcagggtaatgacatgaccaagggtttgttgaccttggccaaaggtaaaccgattggcaaagaaggttactattggttgaagatccacggtgcgaactgcgcaggggtggataaggtaccgttcccggaacgtattaaattcatcgaggaaaaccacgaaaacattatggcgtgcgcaaagagcccgctggaaaacacgtggtgggcagagcaggacagtccattctgcttcttggcgttctgtttcgaatatgcaggtgtccagcaccacggcctgagctataactgcagcctgccgctggcctttgatggttcttgtagcggtattcaacactttagcgccatgctgcgcgatgaggttggtggcagagcagtgaatctgctgccaagcgaaaccgtgcaagatatctatggcattgtggctaagaaggttaatgaaatcctgcaagcagacgcgattaacggcacggacaacgaggttgtcaccgtgaccgatgaaaacaccggtgagatctcggagaaagtgaaactgggcaccaaagccttggctggccaatggctggcatacggcgttactcgctccgtgaccaagcgttcggtgatgacccttgcttacggcagcaaagagtttggtttccgccaacaggttctggaggatactatccaaccggccatcgactctggtaaaggcctgatgttcacgcagccgaatcaggcagcgggctatatggcgaagctgatttgggaatcggttagcgttaccgttgttgcagcggtggaggctatgaactggctgaaatctgcggcgaagctgttagctgcggaggtgaaggacaagaagacgggcgaaatcctgcgtaagcgctgcgcagtgcattgggttacgccggatggttttccggtatggcaggagtacaaaaagcctattcagacccgtctgaacctgatgtttctgggtcaatttcgtctgcagccgacgatcaacaccaataaggactccgagatcgacgcgcacaaacaggagtctggcatcgcacccaatttcgttcactcacaggacggttcccatctgcgtaagaccgtcgtgtgggcacacgagaagtatggcattgagtcgtttgcattgatccacgattcctttggtaccatcccggcggacgctgcgaacctgtttaaagcggttcgcgaaaccatggttgacacctatgaaagttgcgatgttctggcagacttttatgatcagttcgccgaccaactgcatgagtcccagctggataaaatgccggcgttaccggcgaagggcaacttaaatctccgcgacatcctggaatctgatttcgccttcgcgtaa

SEQ ID NO: 195 - DNA, 2652 bp, synthetic construct
  source 1..2652: mol_type = other DNA
atgaatacaattaacatagctaaaaatgatttcagcgatattgaactggctgcgatcccgtttaataccttggcggaccattatggtgagcgtctggcgcgtgagcaacttgctctggagcacgaatcctacgagatgggtgaagcgcgtttccggaagatgttcgagcgccagcttaaggctggcgaggtggcggataacgctgctgcgaagccgttgattacgaccctgctgccgaaaatgattgcgcgtattaacgattggttcgaggaagtgaaagcaaagcgtggtaaacgtccaaccgcattccagtttctgcaagagatcaagccggaggcggtggcatacattacgatcaaaaccactctcgcatgtctcaccagcgcggaaaatactacggtccaagcggtggccagcgcgattggccgcgcgattgaggacgaagcgcgttttggtcgcattcgtgacctggaagcgaaacattttaagaagaacgttgaagaacaattgaatgcaggtgtgggccacgttcacaagaaagcgttcatgcaagtcgttgaagctgatatgctgagcaaaggcctgttaggtggtgaagcatggagcagctggcataaggaggactcaattcacgtcggcgtgcggtgcattgaaatgctgatcgaatcgaccggtatggttagcctgcatcgccaaaacgccggcgtggtgggtcaagatagcgaaacgattgaactggcgccagagtacgcggaagctatcgctaccagagccggcgcattggcggggatcagcccgatgttccagccgtgtgttgtaccaccgaagccgtggaccggtatcaccggtggaggttactgggcgaatggtagacgtccgttggcgttggttcgtacccatagcaaaaaggctctgatgcgttatgaagacgtttacatgccggaagtgtacaaagccatcaacatcgcgcagaacactgcgtggaaaatcaacaaaaaggtgttagctgtggcgaacgtaattacaaaatggaagcactgcccggttgaggacatcccggctattgaacgtgaagagctgccaatgaaaccagaggacattgacatgaatccggaggcgctgaccgcatggaaacgtgcggcagcagcggtctatcgtaagggtaaagccagaaagagccgtcgtatctccctggaattcatgcttgagcaggcgaacaaattcgctaaccacaaagccatctggtttccgtataatatggattggcgtggtcgtgtttacgcggtatcgatgttcaacccgcagggtaatgacatgaccaagggtttgttgaccttggccaaaggtaaaccgattggcaaagaaggttactattggttgaagatccacggtgcgaactgcgcaggggtggataaggtaccgttcccggaacgtattaaattcatcgaggaaaaccacgaaaacattatggcgtgcgcaaagagcccgctggaaaacacgtggtgggcagagcaggacagtccattctgcttcttggcgttctgtttcgaatatgcaggtgtccagcaccacggcctgagctataactgcagcctgccgctggcctttgatggttcttgtagcggtattcaacactttagcgccatgctgcgcgatgaggttggtggcagagcagtgaatctgctgccaagcgaaaccgtgcaagatatctatggcattgtggctaagaaggttaatgaaatcctgcaagcagacgcgattaacggcacggacaacgaggttgtcaccgtgaccgatgaaaacaccggtgagatctcggagaaagtgaaactgggcaccaaagccttggctggccaatggctggcatacggcgttactcgctccgtgaccaagcgttcggtgatgacccttgcttacggcagcaaagagtttggtttccgccaacaggttctggaggatactatccaaccggccatcgactctggtaaaggcctgatgttcacgcagccgaatcaggcagcgggctatatggcgaagctgatttgggaatcggttagcgttaccgttgttgcagcggtggaggctatgaactggctgaaatctgcggcgaagctgttagctgcggaggtgaaggacaagaagacgggcgaaatcctgcgtaagcgctgcgcagtgcattgggttacgccggatggttttccggtatggcaggagtacaaaaagcctattcagacccgtctgaacctgatgtttctgggtcaatttcgtctgcagccgacgatcaacaccaataaggactccgagatcgacgcgcacaaacaggagtctggcatcgcacccaatttcgttcactcacaggacggttcccatctgcgtaagaccgtcgtgtgggcacacgagaagtatggcattgagtcgtttgcattgatccacgattcctttggtaccatcccggcggacgctgcgaacctgtttaaagcggttcgcgaaaccatggttgacacctatgaaagttgcgatgttctggcagacttttatgatcagttcgccgaccaactgcatgagtcccagctggataaaatgccggcgttaccggcgaagggcaacttaaatctccgcgacatcctggaatctgatttcgccttcgcgtaa

SEQ ID NO: 196 - DNA, 2652 bp, synthetic construct
  source 1..2652: mol_type = other DNA
atgaatacaattaacatagctaaaaatgatttcagcgatattgaactggctgcgatcccgtttaataccttggcggaccattatggtgagcgtctggcgcgtgagcaacttgctctggagcacgaatcctacgagatgggtgaagcgcgtttccggaagatgttcgagcgccagcttaaggctggcgaggtggcggataacgctgctgcgaagccgttgattacgaccctgctgccgaaaatgattgcgcgtattaacgattggttcgaggaagtgaaagcaaagcgtggtaaacgtccaaccgcattccagtttctgcaagagatcaagccggaggcggtggcatacattacgatcaaaaccactctcgcatgtctcaccagcgcggaaaatactacggtccaagcggtggccagcgcgattggccgcgcgattgaggacgaagcgcgttttggtcgcattcgtgacctggaagcgaaacattttaagaagaacgttgaagaacaattgaataaaggtgtgggccacgtttacaagaaagcgttcatgcaagtcgttgaagctgatatgctgagcaaaggcctgttaggtggtgaagcatggagcagctggcataaggaggactcaattcacgtcggcgtgcggtgcattgaaatgctgatcgaatcgaccggtatggttagcctgcatcgccaaaacgccggcgtggtgggtcaagatagcgaaacgattgaactggcgccagagtacgcggaagctatcgctaccagagccggcgcattggcggggatcagcccgatgttccagccgtgtgttgtaccaccgaagccgtggaccggtatcaccggtggaggttactgggcgaatggtagacgtccgttggcgttggttcgtacccatagcaaaaaggctctgatgcgttatgaagacgtttacatgccggaagtgtacaaagccatcaacatcgcgcagaacactgcgtggaaaatcaacaaaaaggtgttagctgtggcgaacgtaattacaaaatggaagcactgcccggttgaggacatcccggctattgaacgtgaagagctgccaatgaaaccagaggacattgacatgaatccggaggcgctgaccgcatggaaacgtgcggcagcagcggtctatcgtaaggataaagccagaaagagccgtcgtatctccctggaattcatgcttgagcaggcgaacaaattcgctaaccacaaagccatctggtttccgtataatatggattggcgtggtcgtgtttacgcggtatcgatgttcaacccgcagggtaatgacatgaccaagggtttgttgaccttggccaaaggtaaaccgattggcaaagaaggttactattggttgaagatccacggtgcgaactgcgcaggggtggataaggtaccgttcccggaacgtattaaattcatcgaggaaaaccacgaaaacattatggcgtgcgcaaagagcccgctggaaaacacgtggtgggcagagcaggacagtccattctgcttcttggcgttctgtttcgaatatgcaggtgtccagcaccacggcctgagctataactgcagcctgccgctggcctttgatggttcttgtagcggtattcaacactttagcgccatgctgcgcgatgaggttggtggcagagcagtgaatctgctgccaagcgaaaccgtgcaagatatctatggcattgtggctaagaaggttaatgaaatcctgcaagcagacgcgattaacggcacggacaacgaggttgtcaccgtgaccgatgaaaacaccggtgagatctcggagaaagtgaaactgggcaccaaagccttggctggccaatggctggcatacggcgttactcgctccgtgaccaagcgttcggtgatgacccttgcttacggcagcaaagagtttggtttccgccaacaggttctggaggatactatccaaccggccatcgactctggtaaaggcctgatgttcacgcagccgaatcaggcagcgggctatatggcgaagctgatttgggaatcggttagcgttaccgttgttgcagcggtggaggctatgaactggctgaaatctgcggcgaagctgttagctgcggaggtgaaggacaagaagacgggcgaaatcctgcgtaagcgctgcgcagtgcattgggttacgccggatggttttccggtatggcaggagtacaaaaagcctattcagacccgtctgaacctgatgtttctgggtcaatttcgtctgcagccgacgatcaacaccaataaggactccgagatcgacgcgcacaaacaggagtctggcatcgcacccaatttcgttcactcacaggacggttcccatctgcgtaagaccgtcgtgtgggcacacgagaagtatggcattgagtcgtttgcattgatccacgattcctttggtaccatcccggcggacgctgcgaacctgtttaaagcggttcgcgaaaccatggttgacacctatgaaagttgcgatgttctggcagacttttatgatcagttcgccgaccaactgcatgagtcccagctggataaaatgccggcgttaccggcgaagggcaacttaaatctccgcgacatcctggaatctgatttcgccttcgcgtaa

SEQ ID NO: 197 - DNA, 2652 bp, synthetic construct
  source 1..2652: mol_type = other DNA
atgaatacaattaacatagctaaaaatgatttcagcgatattgaactggctgcgatcccgtttaataccttggcggaccattatggtgagcgtctggcgcgtgagcaacttgctctggagcacgaatcctacgagatgggtgaagcgcgtttccggaagatgttcgagcgccagcttaaggctggcgaggtggcggataacgctgctgcgaagccgttgattacgaccctgctgccgaaaatgattgcgcgtattaacgattggttcgaggaagtgaaagcaaagcgtggtaaacgtccaaccgcattccagtttctgcaagagatcaagccggaggcggtggcatacattacgatcaaaaccactctcgcatgtctcaccagcgcggaaaatactacggtccaagcggtggccagcgcgattggccgcgcgattgaggacgaagcgcgttttggtcgcattcgtgacctggaagcgaaacattttaagaagaacgttgaagaacaattgaatggacgcgtgggccacgttcacaagaaagcgttcatgcaagtcgttgaagctgatatgctgagcaaaggcctgttaggtggtgaagcatggagcagctggcataaggaggactcaattcacgtcggcgtgcggtgcattgaaatgctgatcgaatcgaccggtatggttagcctgcatcgccaaaacgccggcgtggtgggtcaagatagcgaaacgattgaactggcgccagagtacgcggaagctatcgctaccagagccggcgcattggcggggatcagcccgatgttccagccgtgtgttgtaccaccgaagccgtggaccggtatcaccggtggaggttactgggcgaatggtagacgtccgttggcgttggttcgtacccatagcaaaaaggctctgatgcgttatgaagacgtttacatgccggaagtgtacaaagccatcaacatcgcgcagaacactgcgtggaaaatcaacaaaaaggtgttagctgtggcgaacgtaattacaaaatggaagcactgcccggttgaggacatcccggctattgaacgtgaagagctgccaatgaaaccagaggacattgacatgaatccggaggcgctgaccgcatggaaacgtgcggcagcagcggtctatcgtaagggtaaagccagaaagagccgtcgtatctccctggaattcatgcttgagcaggcgaacaaattcgctaaccacaaagccatctggtttccgtataatatggattggcgtggtcgtgtttacgcggtatcgatgttcaacccgcagggtaatgacatgaccaagggtttgttgaccttggccaaaggtaaaccgattggcaaagaaggttactattggttgaagatccacggtgcgaactgcgcaggggtggataaggtaccgttcccggaacgtattaaattcatcgaggaaaaccacgaaaacattatggcgtgcgcaaagagcccgctggaaaacacgtggtgggcagagcaggacagtccattctgcttcttggcgttctgtttcgaatatgcaggtgtccagcaccacggcctgagctataactgcagcctgccgctggcctttgatggttcttgtagcggtattcaacactttagcgccatgctgcgcgatgaggttggtggcagagcagtgaatctgctgccaagcgaaaccgtgcaagatatctatggcattgtggctaagaaggttaatgaaatcctgcaagcagacgcgattaacggcacggacaacgaggttgtcaccgtgaccgatgaaaacaccggtgagatctcggagaaagtgaaactgggcaccaaagccttggctggccaatggctggcatacggcgttactcgctccgtgaccaagcgttcggtgatgacccttgcttacggcagcaaagagtttggtttccgccaacaggttctggaggatactatccaaccggccatcgactctggtaaaggcctgatgttcacgcagccgaatcaggcagcgggctatatggcgaagctgatttgggaatcggttagcgttaccgttgttgcagcggtggaggctatgaactggctgaaatctgcggcgaagctgttagctgcggaggtgaaggacaagaagacgggcgaaatcctgcgtaagcgctgcgcagtgcattgggttacgccggatggttttccggtatggcaggagtacaaaaagcctattcagacccgtctgaacctgatgtttctgggtcaatttcgtctgcagccgacgatcaacaccaataaggactccgagatcgacgcgcacaaacaggagtctggcatcgcacccaatttcgttcactcacaggacggttcccatctgcgtaagaccgtcgtgtgggcacacgagaagtatggcattgagtcgtttgcattgatccacgattcctttggtaccatcccggcggacgctgcgaacctgtttaaagcggttcgcgaaaccatggttgacacctatgaaagttgcgatgttctggcagacttttatgatcagttcgccgaccaactgcatgagtcccagctggataaaatgccggcgttaccggcgaagggcaacttaaatctccgcgacatcctggaatctgatttcgccttcgcgtaa

SEQ ID NO: 198 - DNA, 2652 bp, synthetic construct
  source 1..2652: mol_type = other DNA
atgaatacaattaacatagctaaaaatgatttcagcgatattgaactggctgcgatcccgtttaataccttggcggaccattatggtgagcgtctggcgcgtgagcaacttgctctggagcacgaatcctacgagatgggtgaagcgcgtttccggaagatgttcgagcgccagcttaaggctggcgaggtggcggataacgctgctgcgaagccgttgattacgaccctgctgccgaaaatgattgcgcgtattaacgattggttcgaggaagtgaaagcaaagcgtggtaaacgtccaaccgcattccagtttctgcaagagatcaagccggaggcggtggcatacattacgatcaaaaccactctcgcatgtctcaccagcgcggataatactacggtccaagcggtggccagcgcgattggccgcgcgattgaggacgaagcgcgttttggtcgcattcgtgacctggaagcgaaacattttaagaagaacgttgaagaacaattgaatgcatgtgtgggccacgttcacaagaaagcgttcatgcaagtcgttgaagctgatatgctgagcaaaggcctgttaggtggtgaagcatggagcagctggcataaggaggactcaattcacgtcggcgtgcggtgcattgaaatgctgatcgaatcgaccggtatggttagcctgcatcgccaaaacgccggcgtggtgggtcaagatagcgaaacgattgaactggcgccagagtacgcggaagctatcgctaccagagccggcgcattggcggggatcagcccgatgttccagccgtgtgttgtaccaccgaagccgtggaccggtatcaccggtggaggttactgggcgaatggtagacgtccgttggcgttggttcgtacccatagcaaaaaggctctgatgcgttatgaagacgtttacatgccggaagtgtacaaagccatcaacatcgcgcagaacactgcgtggaaaatcaacaaaaaggtgttagctgtggcgaacgtaattacaaaatggaagcactgcccggttgaggacatcccggctattgaacgtgaagagctgccaatgaaaccagaggacattgacatgaatccggaggcgctgaccgcatggaaacgtgcggcagcagcggtctatcgtaagggtaaagccagaaagagccgtcgtatctccctggaattcatgcttgagcaggcgaacaaattcgctaaccacaaagccatctggtttccgtataatatggattggcgtggtcgtgtttacgcggtatcgatgttcaacccgcagggtaatgacatgaccaagggtttgttgaccttggccaaaggtaaaccgattggcaaagaaggttactattggttgaagatccacggtgcgaactgcgcaggggtggataaggtaccgttcccggaacgtattaaattcatcgaggaaaaccacgaaaacattatggcgtgcgcaaagagcccgctggaaaacacgtggtgggcagagcaggacagtccattctgcttcttggcgttctgtttcgaatatgcaggtgtccagcaccacggcctgagctataactgcagcctgccgctggcctttgatggttcttgtagcggtattcaacactttagcgccatgctgcgcgatgaggttggtggcagagcagtgaatctgctgccaagcgaaaccgtgcaagatatctatggcattgtggctaagaaggttaatgaaatcctgcaagcagacgcgattaacggcacggacaacgaggttgtcaccgtgaccgatgaaaacaccggtgagatctcggagaaagtgaaactgggcaccaaagccttggctggccaatggctggcatacggcgttactcgctccgtgaccaagcgttcggtgatgacccttgcttacggcagcaaagagtttggtttccgccaacaggttctggaggatactatccaaccggccatcgactctggtaaaggcctgatgttcacgcagccgaatcaggcagcgggctatatggcgaagctgatttgggaatcggttagcgttaccgttgttgcagcggtggaggctatgaactggctgaaatctgcggcgaagctgttagctgcggaggtgaaggacaagaagacgggcgaaatcctgcgtaagcgctgcgcagtgcattgggttacgccggatggttttccggtatggcaggagtacaaaaagcctattcagacccgtctgaacctgatgtttctgggtcaatttcgtctgcagccgacgatcaacaccaataaggactccgagatcgacgcgcacaaacaggagtctggcatcgcacccaatttcgttcactcacaggacggttcccatctgcgtaagaccgtcgtgtgggcacacgagaagtatggcattgagtcgtttgcattgatccacgattcctttggtaccatcccggcggacgctgcgaacctgtttaaagcggttcgcgaaaccatggttgacacctatgaaagttgcgatgttctggcagacttttatgatcagttcgccgaccaactgcatgagtcccagctggataaaatgccggcgttaccggcgaagggcaacttaaatctccgcgacatcctggaatctgatttcgccttcgcgtaa

SEQ ID NO: 199 - DNA, 2652 bp, synthetic construct
  source 1..2652: mol_type = other DNA
atgaatacaattaacatagctaaaaatgatttcagcgatattgaactggctgcgatcccgtttaataccttggcggaccattatggtgagcgtctggcgcgtgagcaacttgctctggagcacgaatcctacgagatgggtgaagcgcgtttccggaagatgttcgagcgccagcttaaggctggcgaggtggcggataacgctgctgcgaagccgttgattacgaccctgctgccgaaaatgattgcgcgtattaacgattggttcgaggaagtgaaagcaaagcgtggtaaacgtccaaccgcattccagtttctgcaagagatcaagccggaggcggtggcatacattacgatcaaaaccactctcgcatgtctcaccagcgcggaaaatactacggtccaagcggtggccagcgcgattggccgcgcgattgaggacgaagcgcgttttggtcgcattcgtgacctggaagcgaaacattttaagaagaacgttgaagaacaattgaatggatgtgtgggccacgtttacaagaaagcgttcatgcaagtcgttgaagctgatatgctgagcaaaggcctgttaggtggtgaagcatggagcagctggcataaggaggactcaattcacgtcggcgtgcggtgcattgaaatgctgatcgaatcgaccggtatggttagcctgcatcgccaaaacgccggcgtggtgggtcaagatagcgaaacgattgaactggcgccagagtacgcggaagctatcgctaccagagccggcgcattggcggggatcagcccgatgttccagccgtgtgttgtaccaccgaagccgtggaccggtatcaccggtggaggttactgggcgaatggtagacgtccgttggcgttggttcgtacccatagcaaaaaggctctgatgcgttatgaagacgtttacatgccggaagtgtacaaagccatcaacatcgcgcagaacactgcgtggaaaatcaacaaaaaggtgttagctgtggcgaacgtaattacaaaatggaagcactgcccggttgaggacatcccggctattgaacgtgaagagctgccaatgaaaccagaggacattgacatgaatccggaggcgctgaccgcatggaaacgtgcggcagcagcggtctatcgtaagtataaagccagaaagagccgtcgtatctccctggaattcatgcttgagcaggcgaacaaattcgctaaccacaaagccatctggtttccgtataatatggattggcgtggtcgtgtttacgcggtatcgatgttcaacccgcagggtaatgacatgaccaagggtttgttgaccttggccaaaggtaaaccgattggcaaagaaggttactattggttgaagatccacggtgcgaactgcgcaggggtggataaggtaccgttcccggaacgtattaaattcatcgaggaaaaccacgaaaacattatggcgtgcgcaaagagcccgctggaaaacacgtggtgggcagagcaggacagtccattctgcttcttggcgttctgtttcgaatatgcaggtgtccagcaccacggcctgagctataactgcagcctgccgctggcctttgatggttcttgtagcggtattcaacactttagcgccatgctgcgcgatgaggttggtggcagagcagtgaatctgctgccaagcgaaaccgtgcaagatatctatggcattgtggctaagaaggttaatgaaatcctgcaagcagacgcgattaacggcacggacaacgaggttgtcaccgtgaccgatgaaaacaccggtgagatctcggagaaagtgaaactgggcaccaaagccttggctggccaatggctggcatacggcgttactcgctccgtgaccaagcgttcggtgatgacccttgcttacggcagcaaagagtttggtttccgccaacaggttctggaggatactatccaaccggccatcgactctggtaaaggcctgatgttcacgcagccgaatcaggcagcgggctatatggcgaagctgatttgggaatcggttagcgttaccgttgttgcagcggtggaggctatgaactggctgaaatctgcggcgaagctgttagctgcggaggtgaaggacaagaagacgggcgaaatcctgcgtaagcgctgcgcagtgcattgggttacgccggatggttttccggtatggcaggagtacaaaaagcctattcagacccgtctgaacctgatgtttctgggtcaatttcgtctgcagccgacgatcaacaccaataaggactccgagatcgacgcgcacaaacaggagtctggcatcgcacccaatttcgttcactcacaggacggttcccatctgcgtaagaccgtcgtgtgggcacacgagaagtatggcattgagtcgtttgcattgatccacgattcctttggtaccatcccggcggacgctgcgaacctgtttaaagcggttcgcgaaaccatggttgacacctatgaaagttgcgatgttctggcagacttttatgatcagttcgccgaccaactgcatgagtcccagctggataaaatgccggcgttaccggcgaagggcaacttaaatctccgcgacatcctggaatctgatttcgccttcgcgtaa

SEQ ID NO: 200 - DNA, 2652 bp, synthetic construct
  source 1..2652: mol_type = other DNA
atgaatacaattaacatagctaaaaatgatttcagcgatattgaactggctgcgatcccgtttaataccttggcggaccattatggtgagcgtctggcgcgtgagcaacttgctctggagcacgaatcctacgagatgggtgaagcgcgtttccggaagatgttcgagcgccagcttaaggctggcgaggtggcggataacgctgctgcgaagccgttgattacgaccctgctgccgaaaatgattgcgcgtattaacgattggttcgaggaagtgaaagcaaagcgtggtaaacgtccaaccgcattccagtttctgcaagagatcaagccggaggcggtggcatacattacgatcaaaaccactctcgcatgtctcaccagcgcggaaaatactacggtccaagcggtggccagcgcgattggccgcgcgattgaggacgaagcgcgttttggtcgcattcgtgacctggaagcgaaacattttaagaagaacgttgaagaacaattgaatggaggtgtgggccacgttcacaagaaagcgttcatgcaagtcgttgaagctgatatgctgagcaaaggcctgttaggtggtgaagcatggagcagctggcataaggaggactcaattcacgtcggcgtgcggtgcattgaaatgctgatcgaatcgaccggtatggttagcctgcatcgccaaaacgccggcgtggtgggtcaagatagcgaaacgattgaactggcgccagagtacgcggaagctatcgctaccagagccggcgcattggcggggatcagcccgatgttccagccgtgtgttgtaccaccgaagccgtggaccggtatcaccggtggaggttactgggcgaatggtagacgtccgttggcgttggttcgtacccatagcaaaaaggctctgatgcgttatgaagacgtttacatgccggaagtgtacaaagccatcaacatcgcgcagaacactgcgtggaaaatcaacaaaaaggtgttagctgtggcgaacgtaattacaaaatggaagcactgcccggttgaggacatcccggctattgaacgtgaagagctgccaatgaaaccagaggacattgacatgaatccggaggcgctgaccgcatggaaacgtgcggcagcagcggtctatcgtaaggataaagccagaaagagccgtcgtatctccctggaattcatgcttgagcaggcgaacaaattcgctaaccacaaagccatctggtttccgtataatatggattggcgtggtcgtgtttacgcggtatcgatgttcaacccgcagggtaatgacatgaccaagggtttgttgaccttggccaaaggtaaaccgattggcaaagaaggttactattggttgaagatccacggtgcgaactgcgcaggggtggataaggtaccgttcccggaacgtattaaattcatcgaggaaaaccacgaaaacattatggcgtgcgcaaagagcccgctggaaaacacgtggtgggcagagcaggacagtccattctgcttcttggcgttctgtttcgaatatgcaggtgtccagcaccacggcctgagctataactgcagcctgccgctggcctttgatggttcttgtagcggtattcaacactttagcgccatgctgcgcgatgaggttggtggcagagcagtgaatctgctgccaagcgaaaccgtgcaagatatctatggcattgtggctaagaaggttaatgaaatcctgcaagcagacgcgattaacggcacggacaacgaggttgtcaccgtgaccgatgaaaacaccggtgagatctcggagaaagtgaaactgggcaccaaagccttggctggccaatggctggcatacggcgttactcgctccgtgaccaagcgttcggtgatgacccttgcttacggcagcaaagagtttggtttccgccaacaggttctggaggatactatccaaccggccatcgactctggtaaaggcctgatgttcacgcagccgaatcaggcagcgggctatatggcgaagctgatttgggaatcggttagcgttaccgttgttgcagcggtggaggctatgaactggctgaaatctgcggcgaagctgttagctgcggaggtgaaggacaagaagacgggcgaaatcctgcgtaagcgctgcgcagtgcattgggttacgccggatggttttccggtatggcaggagtacaaaaagcctattcagacccgtctgaacctgatgtttctgggtcaatttcgtctgcagccgacgatcaacaccaataaggactccgagatcgacgcgcacaaacaggagtctggcatcgcacccaatttcgttcactcacaggacggttcccatctgcgtaagaccgtcgtgtgggcacacgagaagtatggcattgagtcgtttgcattgatccacgattcctttggtaccatcccggcggacgctgcgaacctgtttaaagcggttcgcgaaaccatggttgacacctatgaaagttgcgatgttctggcagacttttatgatcagttcgccgaccaactgcatgagtcccagctggataaaatgccggcgttaccggcgaagggcaacttaaatctccgcgacatcctggaatctgatttcgccttcgcgtaa

SEQ ID NO: 201 - DNA, 2652 bp, synthetic construct
  source 1..2652: mol_type = other DNA
atgaatacaattaacatagctaaaaatgatttcagcgatattgaactggctgcgatcccgtttaataccttggcggaccattatggtgagcgtctggcgcgtgagcaacttgctctggagcacgaatcctacgagatgggtgaagcgcgtttccggaagatgttcgagcgccagcttaaggctggcgaggtggcggataacgctgctgcgaagccgttgattacgaccctgctgccgaaaatgattgcgcgtattaacgattggttcgaggaagtgaaagcaaagcgtggtaaacgtccaaccgcattccagtttctgcaagagatcaagccggaggcggtggcatacattacgatcaaaaccactctcgcatgtctcaccagcgcggataatactacggtccaagcggtggccagcgcgattggccgcgcgattgaggacgaagcgcgttttggtcgcattcgtgacctggaagcgaaacattttaagaagaacgttgaagaacaattgaataaagctgtgggccacgttcacaagaaagcgttcatgcaagtcgttgaagctgatatgctgagcaaaggcctgttaggtggtgaagcatggagcagctggcataaggaggactcaattcacgtcggcgtgcggtgcattgaaatgctgatcgaatcgaccggtatggttagcctgcatcgccaaaacgccggcgtggtgggtcaagatagcgaaacgattgaactggcgccagagtacgcggaagctatcgctaccagagccggcgcattggcggggatcagcccgatgttccagccgtgtgttgtaccaccgaagccgtggaccggtatcaccggtggaggttactgggcgaatggtagacgtccgttggcgttggttcgtacccatagcaaaaaggctctgatgcgttatgaagacgtttacatgccggaagtgtacaaagccatcaacatcgcgcagaacactgcgtggaaaatcaacaaaaaggtgttagctgtggcgaacgtaattacaaaatggaagcactgcccggttgaggacatcccggctattgaacgtgaagagctgccaatgaaaccagaggacattgacatgaatccggaggcgctgaccgcatggaaacgtgcggcagcagcggtctatcgtaaggataaagccagaaagagccgtcgtatctccctggaattcatgcttgagcaggcgaacaaattcgctaaccacaaagccatctggtttccgtataatatggattggcgtggtcgtgtttacgcggtatcgatgttcaacccgcagggtaatgacatgaccaagggtttgttgaccttggccaaaggtaaaccgattggcaaagaaggttactattggttgaagatccacggtgcgaactgcgcaggggtggataaggtaccgttcccggaacgtattaaattcatcgaggaaaaccacgaaaacattatggcgtgcgcaaagagcccgctggaaaacacgtggtgggcagagcaggacagtccattctgcttcttggcgttctgtttcgaatatgcaggtgtccagcaccacggcctgagctataactgcagcctgccgctggcctttgatggttcttgtagcggtattcaacactttagcgccatgctgcgcgatgaggttggtggcagagcagtgaatctgctgccaagcgaaaccgtgcaagatatctatggcattgtggctaagaaggttaatgaaatcctgcaagcagacgcgattaacggcacggacaacgaggttgtcaccgtgaccgatgaaaacaccggtgagatctcggagaaagtgaaactgggcaccaaagccttggctggccaatggctggcatacggcgttactcgctccgtgaccaagcgttcggtgatgacccttgcttacggcagcaaagagtttggtttccgccaacaggttctggaggatactatccaaccggccatcgactctggtaaaggcctgatgttcacgcagccgaatcaggcagcgggctatatggcgaagctgatttgggaatcggttagcgttaccgttgttgcagcggtggaggctatgaactggctgaaatctgcggcgaagctgttagctgcggaggtgaaggacaagaagacgggcgaaatcctgcgtaagcgctgcgcagtgcattgggttacgccggatggttttccggtatggcaggagtacaaaaagcctattcagacccgtctgaacctgatgtttctgggtcaatttcgtctgcagccgacgatcaacaccaataaggactccgagatcgacgcgcacaaacaggagtctggcatcgcacccaatttcgttcactcacaggacggttcccatctgcgtaagaccgtcgtgtgggcacacgagaagtatggcattgagtcgtttgcattgatccacgattcctttggtaccatcccggcggacgctgcgaacctgtttaaagcggttcgcgaaaccatggttgacacctatgaaagttgcgatgttctggcagacttttatgatcagttcgccgaccaactgcatgagtcccagctggataaaatgccggcgttaccggcgaagggcaacttaaatctccgcgacatcctggaatctgatttcgccttcgcgtaa

SEQ ID NO: 202 - DNA, 2652 bp, synthetic construct
  source 1..2652: mol_type = other DNA
atgaatacaattaacatagctaaaaatgatttcagcgatattgaactggctgcgatcccgtttaataccttggcggaccattatggtgagcgtctggcgcgtgagcaacttgctctggagcacgaatcctacgagatgggtgaagcgcgtttccggaagatgttcgagcgccagcttaaggctggcgaggtggcggataacgctgctgcgaagccgttgattacgaccctgctgccgaaaatgattgcgcgtattaacgattggttcgaggaagtgaaagcaaagcgtggtaaacgtccaaccgcattccagtttctgcaagagatcaagccggaggcggtggcatacattacgatcaaaaccactctcgcatgtctcaccagcgcggaaaatactacggtccaagcggtggccagcgcgattggccgcgcgattgaggacgaagcgcgttttggtcgcattcgtgacctggaagcgaaacattttaagaagaacgttgaagaacaattgaatgcacgcgtgggccacgttcacaagaaagcgttcatgcaagtcgttgaagctgatatgctgagcaaaggcctgttaggtggtgaagcatggagcagctggcataaggaggactcaattcacgtcggcgtgcggtgcattgaaatgctgatcgaatcgaccggtatggttagcctgcatcgccaaaacgccggcgtggtgggtcaagatagcgaaacgattgaactggcgccagagtacgcggaagctatcgctaccagagccggcgcattggcggggatcagcccgatgttccagccgtgtgttgtaccaccgaagccgtggaccggtatcaccggtggaggttactgggcgaatggtagacgtccgttggcgttggttcgtacccatagcaaaaaggctctgatgcgttatgaagacgtttacatgccggaagtgtacaaagccatcaacatcgcgcagaacactgcgtggaaaatcaacaaaaaggtgttagctgtggcgaacgtaattacaaaatggaagcactgcccggttgaggacatcccggctattgaacgtgaagagctgccaatgaaaccagaggacattgacatgaatccggaggcgctgaccgcatggaaacgtgcggcagcagcggtctatcgtaaggataaagccagaaagagccgtcgtatctccctggaattcatgcttgagcaggcgaacaaattcgctaaccacaaagccatctggtttccgtataatatggattggcgtggtcgtgtttacgcggtatcgatgttcaacccgcagggtaatgacatgaccaagggtttgttgaccttggccaaaggtaaaccgattggcaaagaaggttactattggttgaagatccacggtgcgaactgcgcaggggtggataaggtaccgttcccggaacgtattaaattcatcgaggaaaaccacgaaaacattatggcgtgcgcaaagagcccgctggaaaacacgtggtgggcagagcaggacagtccattctgcttcttggcgttctgtttcgaatatgcaggtgtccagcaccacggcctgagctataactgcagcctgccgctggcctttgatggttcttgtagcggtattcaacactttagcgccatgctgcgcgatgaggttggtggcagagcagtgaatctgctgccaagcgaaaccgtgcaagatatctatggcattgtggctaagaaggttaatgaaatcctgcaagcagacgcgattaacggcacggacaacgaggttgtcaccgtgaccgatgaaaacaccggtgagatctcggagaaagtgaaactgggcaccaaagccttggctggccaatggctggcatacggcgttactcgctccgtgaccaagcgttcggtgatgacccttgcttacggcagcaaagagtttggtttccgccaacaggttctggaggatactatccaaccggccatcgactctggtaaaggcctgatgttcacgcagccgaatcaggcagcgggctatatggcgaagctgatttgggaatcggttagcgttaccgttgttgcagcggtggaggctatgaactggctgaaatctgcggcgaagctgttagctgcggaggtgaaggacaagaagacgggcgaaatcctgcgtaagcgctgcgcagtgcattgggttacgccggatggttttccggtatggcaggagtacaaaaagcctattcagacccgtctgaacctgatgtttctgggtcaatttcgtctgcagccgacgatcaacaccaataaggactccgagatcgacgcgcacaaacaggagtctggcatcgcacccaatttcgttcactcacaggacggttcccatctgcgtaagaccgtcgtgtgggcacacgagaagtatggcattgagtcgtttgcattgatccacgattcctttggtaccatcccggcggacgctgcgaacctgtttaaagcggttcgcgaaaccatggttgacacctatgaaagttgcgatgttctggcagacttttatgatcagttcgccgaccaactgcatgagtcccagctggataaaatgccggcgttaccggcgaagggcaacttaaatctccgcgacatcctggaatctgatttcgccttcgcgtaa

SEQ ID NO: 203 - DNA, 2652 bp, synthetic construct
  source 1..2652: mol_type = other DNA
atgaatacaattaacatagctaaaaatgatttcagcgatattgaactggctgcgatcccgtttaataccttggcggaccattatggtgagcgtctggcgcgtgagcaacttgctctggagcacgaatcctacgagatgggtgaagcgcgtttccggaagatgttcgagcgccagcttaaggctggcgaggtggcggataacgctgctgcgaagccgttgattacgaccctgctgccgaaaatgattgcgcgtattaacgattggttcgaggaagtgaaagcaaagcgtggtaaacgtccaaccgcattccagtttctgcaagagatcaagccggaggcggtggcatacattacgatcaaaaccactctcgcatgtctcaccagcgcggaaaatactacggtccaagcggtggccagcgcgattggccgcgcgattgaggacgaagcgcgttttggtcgcattcgtgacctggaagcgaaacattttaagaagaacgttgaagaacaattgaatgcagctgtgggccacgtttacaagaaagcgttcatgcaagtcgttgaagctgatatgctgagcaaaggcctgttaggtggtgaagcatggagcagctggcataaggaggactcaattcacgtcggcgtgcggtgcattgaaatgctgatcgaatcgaccggtatggttagcctgcatcgccaaaacgccggcgtggtgggtcaagatagcgaaacgattgaactggcgccagagtacgcggaagctatcgctaccagagccggcgcattggcggggatcagcccgatgttccagccgtgtgttgtaccaccgaagccgtggaccggtatcaccggtggaggttactgggcgaatggtagacgtccgttggcgttggttcgtacccatagcaaaaaggctctgatgcgttatgaagacgtttacatgccggaagtgtacaaagccatcaacatcgcgcagaacactgcgtggaaaatcaacaaaaaggtgttagctgtggcgaacgtaattacaaaatggaagcactgcccggttgaggacatcccggctattgaacgtgaagagctgccaatgaaaccagaggacattgacatgaatccggaggcgctgaccgcatggaaacgtgcggcagcagcggtctatcgtaaggataaagccagaaagagccgtcgtatctccctggaattcatgcttgagcaggcgaacaaattcgctaaccacaaagccatctggtttccgtataatatggattggcgtggtcgtgtttacgcggtatcgatgttcaacccgcagggtaatgacatgaccaagggtttgttgaccttggccaaaggtaaaccgattggcaaagaaggttactattggttgaagatccacggtgcgaactgcgcaggggtggataaggtaccgttcccggaacgtattaaattcatcgaggaaaaccacgaaaacattatggcgtgcgcaaagagcccgctggaaaacacgtggtgggcagagcaggacagtccattctgcttcttggcgttctgtttcgaatatgcaggtgtccagcaccacggcctgagctataactgcagcctgccgctggcctttgatggttcttgtagcggtattcaacactttagcgccatgctgcgcgatgaggttggtggcagagcagtgaatctgctgccaagcgaaaccgtgcaagatatctatggcattgtggctaagaaggttaatgaaatcctgcaagcagacgcgattaacggcacggacaacgaggttgtcaccgtgaccgatgaaaacaccggtgagatctcggagaaagtgaaactgggcaccaaagccttggctggccaatggctggcatacggcgttactcgctccgtgaccaagcgttcggtgatgacccttgcttacggcagcaaagagtttggtttccgccaacaggttctggaggatactatccaaccggccatcgactctggtaaaggcctgatgttcacgcagccgaatcaggcagcgggctatatggcgaagctgatttgggaatcggttagcgttaccgttgttgcagcggtggaggctatgaactggctgaaatctgcggcgaagctgttagctgcggaggtgaaggacaagaagacgggcgaaatcctgcgtaagcgctgcgcagtgcattgggttacgccggatggttttccggtatggcaggagtacaaaaagcctattcagacccgtctgaacctgatgtttctgggtcaatttcgtctgcagccgacgatcaacaccaataaggactccgagatcgacgcgcacaaacaggagtctggcatcgcacccaatttcgttcactcacaggacggttcccatctgcgtaagaccgtcgtgtgggcacacgagaagtatggcattgagtcgtttgcattgatccacgattcctttggtaccatcccggcggacgctgcgaacctgtttaaagcggttcgcgaaaccatggttgacacctatgaaagttgcgatgttctggcagacttttatgatcagttcgccgaccaactgcatgagtcccagctggataaaatgccggcgttaccggcgaagggcaacttaaatctccgcgacatcctggaatctgatttcgccttcgcgtaa

SEQ ID NO: 204 - DNA, 2652 bp, synthetic construct
  source 1..2652: mol_type = other DNA
atgaatacaattaacatagctaaaaatgatttcagcgatattgaactggctgcgatcccgtttaataccttggcggaccattatggtgagcgtctggcgcgtgagcaacttgctctggagcacgaatcctacgagatgggtgaagcgcgtttccggaagatgttcgagcgccagcttaaggctggcgaggtggcggataacgctgctgcgaagccgttgattacgaccctgctgccgaaaatgattgcgcgtattaacgattggttcgaggaagtgaaagcaaagcgtggtaaacgtccaaccgcattccagtttctgcaagagatcaagccggaggcggtggcatacattacgatcaaaaccactctcgcatgtctcaccagcgcggaaaatactacggtccaagcggtggccagcgcgattggccgcgcgattgaggacgaagcgcgttttggtcgcattcgtgacctggaagcgaaacattttaagaagaacgttgaagaacaattgaatggaggtgtgggccacgtttacaagaaagcgttcatgcaagtcgttgaagctgatatgctgagcaaaggcctgttaggtggtgaagcatggagcagctggcataaggaggactcaattcacgtcggcgtgcggtgcattgaaatgctgatcgaatcgaccggtatggttagcctgcatcgccaaaacgccggcgtggtgggtcaagatagcgaaacgattgaactggcgccagagtacgcggaagctatcgctaccagagccggcgcattggcggggatcagcccgatgttccagccgtgtgttgtaccaccgaagccgtggaccggtatcaccggtggaggttactgggcgaatggtagacgtccgttggcgttggttcgtacccatagcaaaaaggctctgatgcgttatgaagacgtttacatgccggaagtgtacaaagccatcaacatcgcgcagaacactgcgtggaaaatcaacaaaaaggtgttagctgtggcgaacgtaattacaaaatggaagcactgcccggttgaggacatcccggctattgaacgtgaagagctgccaatgaaaccagaggacattgacatgaatccggaggcgctgaccgcatggaaacgtgcggcagcagcggtctatcgtaagggtaaagccagaaagagccgtcgtatctccctggaattcatgcttgagcaggcgaacaaattcgctaaccacaaagccatctggtttccgtataatatggattggcgtggtcgtgtttacgcggtatcgatgttcaacccgcagggtaatgacatgaccaagggtttgttgaccttggccaaaggtaaaccgattggcaaagaaggttactattggttgaagatccacggtgcgaactgcgcaggggtggataaggtaccgttcccggaacgtattaaattcatcgaggaaaaccacgaaaacattatggcgtgcgcaaagagcccgctggaaaacacgtggtgggcagagcaggacagtccattctgcttcttggcgttctgtttcgaatatgcaggtgtccagcaccacggcctgagctataactgcagcctgccgctggcctttgatggttcttgtagcggtattcaacactttagcgccatgctgcgcgatgaggttggtggcagagcagtgaatctgctgccaagcgaaaccgtgcaagatatctatggcattgtggctaagaaggttaatgaaatcctgcaagcagacgcgattaacggcacggacaacgaggttgtcaccgtgaccgatgaaaacaccggtgagatctcggagaaagtgaaactgggcaccaaagccttggctggccaatggctggcatacggcgttactcgctccgtgaccaagcgttcggtgatgacccttgcttacggcagcaaagagtttggtttccgccaacaggttctggaggatactatccaaccggccatcgactctggtaaaggcctgatgttcacgcagccgaatcaggcagcgggctatatggcgaagctgatttgggaatcggttagcgttaccgttgttgcagcggtggaggctatgaactggctgaaatctgcggcgaagctgttagctgcggaggtgaaggacaagaagacgggcgaaatcctgcgtaagcgctgcgcagtgcattgggttacgccggatggttttccggtatggcaggagtacaaaaagcctattcagacccgtctgaacctgatgtttctgggtcaatttcgtctgcagccgacgatcaacaccaataaggactccgagatcgacgcgcacaaacaggagtctggcatcgcacccaatttcgttcactcacaggacggttcccatctgcgtaagaccgtcgtgtgggcacacgagaagtatggcattgagtcgtttgcattgatccacgattcctttggtaccatcccggcggacgctgcgaacctgtttaaagcggttcgcgaaaccatggttgacacctatgaaagttgcgatgttctggcagacttttatgatcagttcgccgaccaactgcatgagtcccagctggataaaatgccggcgttaccggcgaagggcaacttaaatctccgcgacatcctggaatctgatttcgccttcgcgtaa

SEQ ID NO: 205 - DNA, 2652 bp, synthetic construct
  source 1..2652: mol_type = other DNA
atgaatacaattaacatagctaaaaatgatttcagcgatattgaactggctgcgatcccgtttaataccttggcggaccattatggtgagcgtctggcgcgtgagcaacttgctctggagcacgaatcctacgagatgggtgaagcgcgtttccggaagatgttcgagcgccagcttaaggctggcgaggtggcggataacgctgctgcgaagccgttgattacgaccctgctgccgaaaatgattgcgcgtattaacgattggttcgaggaagtgaaagcaaagcgtggtaaacgtccaaccgcattccagtttctgcaagagatcaagccggaggcggtggcatacattacgatcaaaaccactctcgcatgtctcaccagcgcggaaaatactacggtccaagcggtggccagcgcgattggccgcgcgattgaggacgaagcgcgttttggtcgcattcgtgacctggaagcgaaacattttaagaagaacgttgaagaacaattgaatggatgtgtgggccacgttcacaagaaagcgttcatgcaagtcgttgaagctgatatgctgagcaaaggcctgttaggtggtgaagcatggagcagctggcataaggaggactcaattcacgtcggcgtgcggtgcattgaaatgctgatcgaatcgaccggtatggttagcctgcatcgccaaaacgccggcgtggtgggtcaagatagcgaaacgattgaactggcgccagagtacgcggaagctatcgctaccagagccggcgcattggcggggatcagcccgatgttccagccgtgtgttgtaccaccgaagccgtggaccggtatcaccggtggaggttactgggcgaatggtagacgtccgttggcgttggttcgtacccatagcaaaaaggctctgatgcgttatgaagacgtttacatgccggaagtgtacaaagccatcaacatcgcgcagaacactgcgtggaaaatcaacaaaaaggtgttagctgtggcgaacgtaattacaaaatggaagcactgcccggttgaggacatcccggctattgaacgtgaagagctgccaatgaaaccagaggacattgacatgaatccggaggcgctgaccgcatggaaacgtgcggcagcagcggtctatcgtaagtataaagccagaaagagccgtcgtatctccctggaattcatgcttgagcaggcgaacaaattcgctaaccacaaagccatctggtttccgtataatatggattggcgtggtcgtgtttacgcggtatcgatgttcaacccgcagggtaatgacatgaccaagggtttgttgaccttggccaaaggtaaaccgattggcaaagaaggttactattggttgaagatccacggtgcgaactgcgcaggggtggataaggtaccgttcccggaacgtattaaattcatcgaggaaaaccacgaaaacattatggcgtgcgcaaagagcccgctggaaaacacgtggtgggcagagcaggacagtccattctgcttcttggcgttctgtttcgaatatgcaggtgtccagcaccacggcctgagctataactgcagcctgccgctggcctttgatggttcttgtagcggtattcaacactttagcgccatgctgcgcgatgaggttggtggcagagcagtgaatctgctgccaagcgaaaccgtgcaagatatctatggcattgtggctaagaaggttaatgaaatcctgcaagcagacgcgattaacggcacggacaacgaggttgtcaccgtgaccgatgaaaacaccggtgagatctcggagaaagtgaaactgggcaccaaagccttggctggccaatggctggcatacggcgttactcgctccgtgaccaagcgttcggtgatgacccttgcttacggcagcaaagagtttggtttccgccaacaggttctggaggatactatccaaccggccatcgactctggtaaaggcctgatgttcacgcagccgaatcaggcagcgggctatatggcgaagctgatttgggaatcggttagcgttaccgttgttgcagcggtggaggctatgaactggctgaaatctgcggcgaagctgttagctgcggaggtgaaggacaagaagacgggcgaaatcctgcgtaagcgctgcgcagtgcattgggttacgccggatggttttccggtatggcaggagtacaaaaagcctattcagacccgtctgaacctgatgtttctgggtcaatttcgtctgcagccgacgatcaacaccaataaggactccgagatcgacgcgcacaaacaggagtctggcatcgcacccaatttcgttcactcacaggacggttcccatctgcgtaagaccgtcgtgtgggcacacgagaagtatggcattgagtcgtttgcattgatccacgattcctttggtaccatcccggcggacgctgcgaacctgtttaaagcggttcgcgaaaccatggttgacacctatgaaagttgcgatgttctggcagacttttatgatcagttcgccgaccaactgcatgagtcccagctggataaaatgccggcgttaccggcgaagggcaacttaaatctccgcgacatcctggaatctgatttcgccttcgcgtaa

SEQ ID NO: 206 - DNA, 2652 bp, synthetic construct
  source 1..2652: mol_type = other DNA
atgaatacaattaacatagctaaaaatgatttcagcgatattgaactggctgcgatcccgtttaataccttggcggaccattatggtgagcgtctggcgcgtgagcaacttgctctggagcacgaatcctacgagatgggtgaagcgcgtttccggaagatgttcgagcgccagcttaaggctggcgaggtggcggataacgctgctgcgaagccgttgattacgaccctgctgccgaaaatgattgcgcgtattaacgattggttcgaggaagtgaaagcaaagcgtggtaaacgtccaaccgcattccagtttctgcaagagatcaagccggaggcggtggcatacattacgatcaaaaccactctcgcatgtctcaccagcgcggataatactacggtccaagcggtggccagcgcgattggccgcgcgattgaggacgaagcgcgttttggtcgcattcgtgacctggaagcgaaacattttaagaagaacgttgaagaacaattgaatggacgcgtgggccacgtttacaagaaagcgttcatgcaagtcgttgaagctgatatgctgagcaaaggcctgttaggtggtgaagcatggagcagctggcataaggaggactcaattcacgtcggcgtgcggtgcattgaaatgctgatcgaatcgaccggtatggttagcctgcatcgccaaaacgccggcgtggtgggtcaagatagcgaaacgattgaactggcgccagagtacgcggaagctatcgctaccagagccggcgcattggcggggatcagcccgatgttccagccgtgtgttgtaccaccgaagccgtggaccggtatcaccggtggaggttactgggcgaatggtagacgtccgttggcgttggttcgtacccatagcaaaaaggctctgatgcgttatgaagacgtttacatgccggaagtgtacaaagccatcaacatcgcgcagaacactgcgtggaaaatcaacaaaaaggtgttagctgtggcgaacgtaattacaaaatggaagcactgcccggttgaggacatcccggctattgaacgtgaagagctgccaatgaaaccagaggacattgacatgaatccggaggcgctgaccgcatggaaacgtgcggcagcagcggtctatcgtaagtataaagccagaaagagccgtcgtatctccctggaattcatgcttgagcaggcgaacaaattcgctaaccacaaagccatctggtttccgtataatatggattggcgtggtcgtgtttacgcggtatcgatgttcaacccgcagggtaatgacatgaccaagggtttgttgaccttggccaaaggtaaaccgattggcaaagaaggttactattggttgaagatccacggtgcgaactgcgcaggggtggataaggtaccgttcccggaacgtattaaattcatcgaggaaaaccacgaaaacattatggcgtgcgcaaagagcccgctggaaaacacgtggtgggcagagcaggacagtccattctgcttcttggcgttctgtttcgaatatgcaggtgtccagcaccacggcctgagctataactgcagcctgccgctggcctttgatggttcttgtagcggtattcaacactttagcgccatgctgcgcgatgaggttggtggcagagcagtgaatctgctgccaagcgaaaccgtgcaagatatctatggcattgtggctaagaaggttaatgaaatcctgcaagcagacgcgattaacggcacggacaacgaggttgtcaccgtgaccgatgaaaacaccggtgagatctcggagaaagtgaaactgggcaccaaagccttggctggccaatggctggcatacggcgttactcgctccgtgaccaagcgttcggtgatgacccttgcttacggcagcaaagagtttggtttccgccaacaggttctggaggatactatccaaccggccatcgactctggtaaaggcctgatgttcacgcagccgaatcaggcagcgggctatatggcgaagctgatttgggaatcggttagcgttaccgttgttgcagcggtggaggctatgaactggctgaaatctgcggcgaagctgttagctgcggaggtgaaggacaagaagacgggcgaaatcctgcgtaagcgctgcgcagtgcattgggttacgccggatggttttccggtatggcaggagtacaaaaagcctattcagacccgtctgaacctgatgtttctgggtcaatttcgtctgcagccgacgatcaacaccaataaggactccgagatcgacgcgcacaaacaggagtctggcatcgcacccaatttcgttcactcacaggacggttcccatctgcgtaagaccgtcgtgtgggcacacgagaagtatggcattgagtcgtttgcattgatccacgattcctttggtaccatcccggcggacgctgcgaacctgtttaaagcggttcgcgaaaccatggttgacacctatgaaagttgcgatgttctggcagacttttatgatcagttcgccgaccaactgcatgagtcccagctggataaaatgccggcgttaccggcgaagggcaacttaaatctccgcgacatcctggaatctgatttcgccttcgcgtaa

SEQ ID NO: 207 - DNA, 2652 bp, synthetic construct
  source 1..2652: mol_type = other DNA
atgaatacaattaacatagctaaaaatgatttcagcgatattgaactggctgcgatcccgtttaataccttggcggaccattatggtgagcgtctggcgcgtgagcaacttgctctggagcacgaatcctacgagatgggtgaagcgcgtttccggaagatgttcgagcgccagcttaaggctggcgaggtggcggataacgctgctgcgaagccgttgattacgaccctgctgccgaaaatgattgcgcgtattaacgattggttcgaggaagtgaaagcaaagcgtggtaaacgtccaaccgcattccagtttctgcaagagatcaagccggaggcggtggcatacattacgatcaaaaccactctcgcatgtctcaccagcgcggaaaatactacggtccaagcggtggccagcgcgattggccgcgcgattgaggacgaagcgcgttttggtcgcattcgtgacctggaagcgaaacattttaagaagaacgttgaagaacaattgaatgcacgcgtgggccacgtttacaagaaagcgttcatgcaagtcgttgaagctgatatgctgagcaaaggcctgttaggtggtgaagcatggagcagctggcataaggaggactcaattcacgtcggcgtgcggtgcattgaaatgctgatcgaatcgaccggtatggttagcctgcatcgccaaaacgccggcgtggtgggtcaagatagcgaaacgattgaactggcgccagagtacgcggaagctatcgctaccagagccggcgcattggcggggatcagcccgatgttccagccgtgtgttgtaccaccgaagccgtggaccggtatcaccggtggaggttactgggcgaatggtagacgtccgttggcgttggttcgtacccatagcaaaaaggctctgatgcgttatgaagacgtttacatgccggaagtgtacaaagccatcaacatcgcgcagaacactgcgtggaaaatcaacaaaaaggtgttagctgtggcgaacgtaattacaaaatggaagcactgcccggttgaggacatcccggctattgaacgtgaagagctgccaatgaaaccagaggacattgacatgaatccggaggcgctgaccgcatggaaacgtgcggcagcagcggtctatcgtaaggataaagccagaaagagccgtcgtatctccctggaattcatgcttgagcaggcgaacaaattcgctaaccacaaagccatctggtttccgtataatatggattggcgtggtcgtgtttacgcggtatcgatgttcaacccgcagggtaatgacatgaccaagggtttgttgaccttggccaaaggtaaaccgattggcaaagaaggttactattggttgaagatccacggtgcgaactgcgcaggggtggataaggtaccgttcccggaacgtattaaattcatcgaggaaaaccacgaaaacattatggcgtgcgcaaagagcccgctggaaaacacgtggtgggcagagcaggacagtccattctgcttcttggcgttctgtttcgaatatgcaggtgtccagcaccacggcctgagctataactgcagcctgccgctggcctttgatggttcttgtagcggtattcaacactttagcgccatgctgcgcgatgaggttggtggcagagcagtgaatctgctgccaagcgaaaccgtgcaagatatctatggcattgtggctaagaaggttaatgaaatcctgcaagcagacgcgattaacggcacggacaacgaggttgtcaccgtgaccgatgaaaacaccggtgagatctcggagaaagtgaaactgggcaccaaagccttggctggccaatggctggcatacggcgttactcgctccgtgaccaagcgttcggtgatgacccttgcttacggcagcaaagagtttggtttccgccaacaggttctggaggatactatccaaccggccatcgactctggtaaaggcctgatgttcacgcagccgaatcaggcagcgggctatatggcgaagctgatttgggaatcggttagcgttaccgttgttgcagcggtggaggctatgaactggctgaaatctgcggcgaagctgttagctgcggaggtgaaggacaagaagacgggcgaaatcctgcgtaagcgctgcgcagtgcattgggttacgccggatggttttccggtatggcaggagtacaaaaagcctattcagacccgtctgaacctgatgtttctgggtcaatttcgtctgcagccgacgatcaacaccaataaggactccgagatcgacgcgcacaaacaggagtctggcatcgcacccaatttcgttcactcacaggacggttcccatctgcgtaagaccgtcgtgtgggcacacgagaagtatggcattgagtcgtttgcattgatccacgattcctttggtaccatcccggcggacgctgcgaacctgtttaaagcggttcgcgaaaccatggttgacacctatgaaagttgcgatgttctggcagacttttatgatcagttcgccgaccaactgcatgagtcccagctggataaaatgccggcgttaccggcgaagggcaacttaaatctccgcgacatcctggaatctgatttcgccttcgcgtaa

SEQ ID NO: 208 - DNA, 2652 bp, synthetic construct
  source 1..2652: mol_type = other DNA
atgaatacaattaacatagctaaaaatgatttcagcgatattgaactggctgcgatcccgtttaataccttggcggaccattatggtgagcgtctggcgcgtgagcaacttgctctggagcacgaatcctacgagatgggtgaagcgcgtttccggaagatgttcgagcgccagcttaaggctggcgaggtggcggataacgctgctgcgaagccgttgattacgaccctgctgccgaaaatgattgcgcgtattaacgattggttcgaggaagtgaaagcaaagcgtggtaaacgtccaaccgcattccagtttctgcaagagatcaagccggaggcggtggcatacattacgatcaaaaccactctcgcatgtctcaccagcgcggaaaatactacggtccaagcggtggccagcgcgattggccgcgcgattgaggacgaagcgcgttttggtcgcattcgtgacctggaagcgaaacattttaagaagaacgttgaagaacaattgaataaagctgtgggccacgtttacaagaaagcgttcatgcaagtcgttgaagctgatatgctgagcaaaggcctgttaggtggtgaagcatggagcagctggcataaggaggactcaattcacgtcggcgtgcggtgcattgaaatgctgatcgaatcgaccggtatggttagcctgcatcgccaaaacgccggcgtggtgggtcaagatagcgaaacgattgaactggcgccagagtacgcggaagctatcgctaccagagccggcgcattggcggggatcagcccgatgttccagccgtgtgttgtaccaccgaagccgtggaccggtatcaccggtggaggttactgggcgaatggtagacgtccgttggcgttggttcgtacccatagcaaaaaggctctgatgcgttatgaagacgtttacatgccggaagtgtacaaagccatcaacatcgcgcagaacactgcgtggaaaatcaacaaaaaggtgttagctgtggcgaacgtaattacaaaatggaagcactgcccggttgaggacatcccggctattgaacgtgaagagctgccaatgaaaccagaggacattgacatgaatccggaggcgctgaccgcatggaaacgtgcggcagcagcggtctatcgtaagggtaaagccagaaagagccgtcgtatctccctggaattcatgcttgagcaggcgaacaaattcgctaaccacaaagccatctggtttccgtataatatggattggcgtggtcgtgtttacgcggtatcgatgttcaacccgcagggtaatgacatgaccaagggtttgttgaccttggccaaaggtaaaccgattggcaaagaaggttactattggttgaagatccacggtgcgaactgcgcaggggtggataaggtaccgttcccggaacgtattaaattcatcgaggaaaaccacgaaaacattatggcgtgcgcaaagagcccgctggaaaacacgtggtgggcagagcaggacagtccattctgcttcttggcgttctgtttcgaatatgcaggtgtccagcaccacggcctgagctataactgcagcctgccgctggcctttgatggttcttgtagcggtattcaacactttagcgccatgctgcgcgatgaggttggtggcagagcagtgaatctgctgccaagcgaaaccgtgcaagatatctatggcattgtggctaagaaggttaatgaaatcctgcaagcagacgcgattaacggcacggacaacgaggttgtcaccgtgaccgatgaaaacaccggtgagatctcggagaaagtgaaactgggcaccaaagccttggctggccaatggctggcatacggcgttactcgctccgtgaccaagcgttcggtgatgacccttgcttacggcagcaaagagtttggtttccgccaacaggttctggaggatactatccaaccggccatcgactctggtaaaggcctgatgttcacgcagccgaatcaggcagcgggctatatggcgaagctgatttgggaatcggttagcgttaccgttgttgcagcggtggaggctatgaactggctgaaatctgcggcgaagctgttagctgcggaggtgaaggacaagaagacgggcgaaatcctgcgtaagcgctgcgcagtgcattgggttacgccggatggttttccggtatggcaggagtacaaaaagcctattcagacccgtctgaacctgatgtttctgggtcaatttcgtctgcagccgacgatcaacaccaataaggactccgagatcgacgcgcacaaacaggagtctggcatcgcacccaatttcgttcactcacaggacggttcccatctgcgtaagaccgtcgtgtgggcacacgagaagtatggcattgagtcgtttgcattgatccacgattcctttggtaccatcccggcggacgctgcgaacctgtttaaagcggttcgcgaaaccatggttgacacctatgaaagttgcgatgttctggcagacttttatgatcagttcgccgaccaactgcatgagtcccagctggataaaatgccggcgttaccggcgaagggcaacttaaatctccgcgacatcctggaatctgatttcgccttcgcgtaa

SEQ ID NO: 209 - DNA, 2652 bp, synthetic construct
  source 1..2652: mol_type = other DNA
atgaatacaattaacatagctaaaaatgatttcagcgatattgaactggctgcgatcccgtttaataccttggcggaccattatggtgagcgtctggcgcgtgagcaacttgctctggagcacgaatcctacgagatgggtgaagcgcgtttccggaagatgttcgagcgccagcttaaggctggcgaggtggcggataacgctgctgcgaagccgttgattacgaccctgctgccgaaaatgattgcgcgtattaacgattggttcgaggaagtgaaagcaaagcgtggtaaacgtccaaccgcattccagtttctgcaagagatcaagccggaggcggtggcatacattacgatcaaaaccactctcgcatgtctcaccagcgcggataatactacggtccaagcggtggccagcgcgattggccgcgcgattgaggacgaagcgcgttttggtcgcattcgtgacctggaagcgaaacattttaagaagaacgttgaagaacaattgaatgcacgcgtgggccacgtttacaagaaagcgttcatgcaagtcgttgaagctgatatgctgagcaaaggcctgttaggtggtgaagcatggagcagctggcataaggaggactcaattcacgtcggcgtgcggtgcattgaaatgctgatcgaatcgaccggtatggttagcctgcatcgccaaaacgccggcgtggtgggtcaagatagcgaaacgattgaactggcgccagagtacgcggaagctatcgctaccagagccggcgcattggcggggatcagcccgatgttccagccgtgtgttgtaccaccgaagccgtggaccggtatcaccggtggaggttactgggcgaatggtagacgtccgttggcgttggttcgtacccatagcaaaaaggctctgatgcgttatgaagacgtttacatgccggaagtgtacaaagccatcaacatcgcgcagaacactgcgtggaaaatcaacaaaaaggtgttagctgtggcgaacgtaattacaaaatggaagcactgcccggttgaggacatcccggctattgaacgtgaagagctgccaatgaaaccagaggacattgacatgaatccggaggcgctgaccgcatggaaacgtgcggcagcagcggtctatcgtaagtataaagccagaaagagccgtcgtatctccctggaattcatgcttgagcaggcgaacaaattcgctaaccacaaagccatctggtttccgtataatatggattggcgtggtcgtgtttacgcggtatcgatgttcaacccgcagggtaatgacatgaccaagggtttgttgaccttggccaaaggtaaaccgattggcaaagaaggttactattggttgaagatccacggtgcgaactgcgcaggggtggataaggtaccgttcccggaacgtattaaattcatcgaggaaaaccacgaaaacattatggcgtgcgcaaagagcccgctggaaaacacgtggtgggcagagcaggacagtccattctgcttcttggcgttctgtttcgaatatgcaggtgtccagcaccacggcctgagctataactgcagcctgccgctggcctttgatggttcttgtagcggtattcaacactttagcgccatgctgcgcgatgaggttggtggcagagcagtgaatctgctgccaagcgaaaccgtgcaagatatctatggcattgtggctaagaaggttaatgaaatcctgcaagcagacgcgattaacggcacggacaacgaggttgtcaccgtgaccgatgaaaacaccggtgagatctcggagaaagtgaaactgggcaccaaagccttggctggccaatggctggcatacggcgttactcgctccgtgaccaagcgttcggtgatgacccttgcttacggcagcaaagagtttggtttccgccaacaggttctggaggatactatccaaccggccatcgactctggtaaaggcctgatgttcacgcagccgaatcaggcagcgggctatatggcgaagctgatttgggaatcggttagcgttaccgttgttgcagcggtggaggctatgaactggctgaaatctgcggcgaagctgttagctgcggaggtgaaggacaagaagacgggcgaaatcctgcgtaagcgctgcgcagtgcattgggttacgccggatggttttccggtatggcaggagtacaaaaagcctattcagacccgtctgaacctgatgtttctgggtcaatttcgtctgcagccgacgatcaacaccaataaggactccgagatcgacgcgcacaaacaggagtctggcatcgcacccaatttcgttcactcacaggacggttcccatctgcgtaagaccgtcgtgtgggcacacgagaagtatggcattgagtcgtttgcattgatccacgattcctttggtaccatcccggcggacgctgcgaacctgtttaaagcggttcgcgaaaccatggttgacacctatgaaagttgcgatgttctggcagacttttatgatcagttcgccgaccaactgcatgagtcccagctggataaaatgccggcgttaccggcgaagggcaacttaaatctccgcgacatcctggaatctgatttcgccttcgcgtaa

SEQ ID NO: 210 - DNA, 2652 bp, synthetic construct
  source 1..2652: mol_type = other DNA
atgaatacaattaacatagctaaaaatgatttcagcgatattgaactggctgcgatcccgtttaataccttggcggaccattatggtgagcgtctggcgcgtgagcaacttgctctggagcacgaatcctacgagatgggtgaagcgcgtttccggaagatgttcgagcgccagcttaaggctggcgaggtggcggataacgctgctgcgaagccgttgattacgaccctgctgccgaaaatgattgcgcgtattaacgattggttcgaggaagtgaaagcaaagcgtggtaaacgtccaaccgcattccagtttctgcaagagatcaagccggaggcggtggcatacattacgatcaaaaccactctcgcatgtctcaccagcgcggaaaatactacggtccaagcggtggccagcgcgattggccgcgcgattgaggacgaagcgcgttttggtcgcattcgtgacctggaagcgaaacattttaagaagaacgttgaagaacaattgaatgcatgtgtgggccacgtttacaagaaagcgttcatgcaagtcgttgaagctgatatgctgagcaaaggcctgttaggtggtgaagcatggagcagctggcataaggaggactcaattcacgtcggcgtgcggtgcattgaaatgctgatcgaatcgaccggtatggttagcctgcatcgccaaaacgccggcgtggtgggtcaagatagcgaaacgattgaactggcgccagagtacgcggaagctatcgctaccagagccggcgcattggcggggatcagcccgatgttccagccgtgtgttgtaccaccgaagccgtggaccggtatcaccggtggaggttactgggcgaatggtagacgtccgttggcgttggttcgtacccatagcaaaaaggctctgatgcgttatgaagacgtttacatgccggaagtgtacaaagccatcaacatcgcgcagaacactgcgtggaaaatcaacaaaaaggtgttagctgtggcgaacgtaattacaaaatggaagcactgcccggttgaggacatcccggctattgaacgtgaagagctgccaatgaaaccagaggacattgacatgaatccggaggcgctgaccgcatggaaacgtgcggcagcagcggtctatcgtaagggtaaagccagaaagagccgtcgtatctccctggaattcatgcttgagcaggcgaacaaattcgctaaccacaaagccatctggtttccgtataatatggattggcgtggtcgtgtttacgcggtatcgatgttcaacccgcagggtaatgacatgaccaagggtttgttgaccttggccaaaggtaaaccgattggcaaagaaggttactattggttgaagatccacggtgcgaactgcgcaggggtggataaggtaccgttcccggaacgtattaaattcatcgaggaaaaccacgaaaacattatggcgtgcgcaaagagcccgctggaaaacacgtggtgggcagagcaggacagtccattctgcttcttggcgttctgtttcgaatatgcaggtgtccagcaccacggcctgagctataactgcagcctgccgctggcctttgatggttcttgtagcggtattcaacactttagcgccatgctgcgcgatgaggttggtggcagagcagtgaatctgctgccaagcgaaaccgtgcaagatatctatggcattgtggctaagaaggttaatgaaatcctgcaagcagacgcgattaacggcacggacaacgaggttgtcaccgtgaccgatgaaaacaccggtgagatctcggagaaagtgaaactgggcaccaaagccttggctggccaatggctggcatacggcgttactcgctccgtgaccaagcgttcggtgatgacccttgcttacggcagcaaagagtttggtttccgccaacaggttctggaggatactatccaaccggccatcgactctggtaaaggcctgatgttcacgcagccgaatcaggcagcgggctatatggcgaagctgatttgggaatcggttagcgttaccgttgttgcagcggtggaggctatgaactggctgaaatctgcggcgaagctgttagctgcggaggtgaaggacaagaagacgggcgaaatcctgcgtaagcgctgcgcagtgcattgggttacgccggatggttttccggtatggcaggagtacaaaaagcctattcagacccgtctgaacctgatgtttctgggtcaatttcgtctgcagccgacgatcaacaccaataaggactccgagatcgacgcgcacaaacaggagtctggcatcgcacccaatttcgttcactcacaggacggttcccatctgcgtaagaccgtcgtgtgggcacacgagaagtatggcattgagtcgtttgcattgatccacgattcctttggtaccatcccggcggacgctgcgaacctgtttaaagcggttcgcgaaaccatggttgacacctatgaaagttgcgatgttctggcagacttttatgatcagttcgccgaccaactgcatgagtcccagctggataaaatgccggcgttaccggcgaagggcaacttaaatctccgcgacatcctggaatctgatttcgccttcgcgtaa

SEQ ID NO: 211 - DNA, 2652 bp, synthetic construct
  source 1..2652: mol_type = other DNA
atgaatacaattaacatagctaaaaatgatttcagcgatattgaactggctgcgatcccgtttaataccttggcggaccattatggtgagcgtctggcgcgtgagcaacttgctctggagcacgaatcctacgagatgggtgaagcgcgtttccggaagatgttcgagcgccagcttaaggctggcgaggtggcggataacgctgctgcgaagccgttgattacgaccctgctgccgaaaatgattgcgcgtattaacgattggttcgaggaagtgaaagcaaagcgtggtaaacgtccaaccgcattccagtttctgcaagagatcaagccggaggcggtggcatacattacgatcaaaaccactctcgcatgtctcaccagcgcggaaaatactacggtccaagcggtggccagcgcgattggccgcgcgattgaggacgaagcgcgttttggtcgcattcgtgacctggaagcgaaacattttaagaagaacgttgaagaacaattgaataaatgtgtgggccacgtttacaagaaagcgttcatgcaagtcgttgaagctgatatgctgagcaaaggcctgttaggtggtgaagcatggagcagctggcataaggaggactcaattcacgtcggcgtgcggtgcattgaaatgctgatcgaatcgaccggtatggttagcctgcatcgccaaaacgccggcgtggtgggtcaagatagcgaaacgattgaactggcgccagagtacgcggaagctatcgctaccagagccggcgcattggcggggatcagcccgatgttccagccgtgtgttgtaccaccgaagccgtggaccggtatcaccggtggaggttactgggcgaatggtagacgtccgttggcgttggttcgtacccatagcaaaaaggctctgatgcgttatgaagacgtttacatgccggaagtgtacaaagccatcaacatcgcgcagaacactgcgtggaaaatcaacaaaaaggtgttagctgtggcgaacgtaattacaaaatggaagcactgcccggttgaggacatcccggctattgaacgtgaagagctgccaatgaaaccagaggacattgacatgaatccggaggcgctgaccgcatggaaacgtgcggcagcagcggtctatcgtaaggataaagccagaaagagccgtcgtatctccctggaattcatgcttgagcaggcgaacaaattcgctaaccacaaagccatctggtttccgtataatatggattggcgtggtcgtgtttacgcggtatcgatgttcaacccgcagggtaatgacatgaccaagggtttgttgaccttggccaaaggtaaaccgattggcaaagaaggttactattggttgaagatccacggtgcgaactgcgcaggggtggataaggtaccgttcccggaacgtattaaattcatcgaggaaaaccacgaaaacattatggcgtgcgcaaagagcccgctggaaaacacgtggtgggcagagcaggacagtccattctgcttcttggcgttctgtttcgaatatgcaggtgtccagcaccacggcctgagctataactgcagcctgccgctggcctttgatggttcttgtagcggtattcaacactttagcgccatgctgcgcgatgaggttggtggcagagcagtgaatctgctgccaagcgaaaccgtgcaagatatctatggcattgtggctaagaaggttaatgaaatcctgcaagcagacgcgattaacggcacggacaacgaggttgtcaccgtgaccgatgaaaacaccggtgagatctcggagaaagtgaaactgggcaccaaagccttggctggccaatggctggcatacggcgttactcgctccgtgaccaagcgttcggtgatgacccttgcttacggcagcaaagagtttggtttccgccaacaggttctggaggatactatccaaccggccatcgactctggtaaaggcctgatgttcacgcagccgaatcaggcagcgggctatatggcgaagctgatttgggaatcggttagcgttaccgttgttgcagcggtggaggctatgaactggctgaaatctgcggcgaagctgttagctgcggaggtgaaggacaagaagacgggcgaaatcctgcgtaagcgctgcgcagtgcattgggttacgccggatggttttccggtatggcaggagtacaaaaagcctattcagacccgtctgaacctgatgtttctgggtcaatttcgtctgcagccgacgatcaacaccaataaggactccgagatcgacgcgcacaaacaggagtctggcatcgcacccaatttcgttcactcacaggacggttcccatctgcgtaagaccgtcgtgtgggcacacgagaagtatggcattgagtcgtttgcattgatccacgattcctttggtaccatcccggcggacgctgcgaacctgtttaaagcggttcgcgaaaccatggttgacacctatgaaagttgcgatgttctggcagacttttatgatcagttcgccgaccaactgcatgagtcccagctggataaaatgccggcgttaccggcgaagggcaacttaaatctccgcgacatcctggaatctgatttcgccttcgcgtaa

SEQ ID NO: 212 - DNA, 2652 bp, synthetic construct
  source 1..2652: mol_type = other DNA
atgaatacaattaacatagctaaaaatgatttcagcgatattgaactggctgcgatcccgtttaataccttggcggaccattatggtgagcgtctggcgcgtgagcaacttgctctggagcacgaatcctacgagatgggtgaagcgcgtttccggaagatgttcgagcgccagcttaaggctggcgaggtggcggataacgctgctgcgaagccgttgattacgaccctgctgccgaaaatgattgcgcgtattaacgattggttcgaggaagtgaaagcaaagcgtggtaaacgtccaaccgcattccagtttctgcaagagatcaagccggaggcggtggcatacattacgatcaaaaccactctcgcatgtctcaccagcgcggataatactacggtccaagcggtggccagcgcgattggccgcgcgattgaggacgaagcgcgttttggtcgcattcgtgacctggaagcgaaacattttaagaagaacgttgaagaacaattgaataaagctgtgggccacgtttacaagaaagcgttcatgcaagtcgttgaagctgatatgctgagcaaaggcctgttaggtggtgaagcatggagcagctggcataaggaggactcaattcacgtcggcgtgcggtgcattgaaatgctgatcgaatcgaccggtatggttagcctgcatcgccaaaacgccggcgtggtgggtcaagatagcgaaacgattgaactggcgccagagtacgcggaagctatcgctaccagagccggcgcattggcggggatcagcccgatgttccagccgtgtgttgtaccaccgaagccgtggaccggtatcaccggtggaggttactgggcgaatggtagacgtccgttggcgttggttcgtacccatagcaaaaaggctctgatgcgttatgaagacgtttacatgccggaagtgtacaaagccatcaacatcgcgcagaacactgcgtggaaaatcaacaaaaaggtgttagctgtggcgaacgtaattacaaaatggaagcactgcccggttgaggacatcccggctattgaacgtgaagagctgccaatgaaaccagaggacattgacatgaatccggaggcgctgaccgcatggaaacgtgcggcagcagcggtctatcgtaagtataaagccagaaagagccgtcgtatctccctggaattcatgcttgagcaggcgaacaaattcgctaaccacaaagccatctggtttccgtataatatggattggcgtggtcgtgtttacgcggtatcgatgttcaacccgcagggtaatgacatgaccaagggtttgttgaccttggccaaaggtaaaccgattggcaaagaaggttactattggttgaagatccacggtgcgaactgcgcaggggtggataaggtaccgttcccggaacgtattaaattcatcgaggaaaaccacgaaaacattatggcgtgcgcaaagagcccgctggaaaacacgtggtgggcagagcaggacagtccattctgcttcttggcgttctgtttcgaatatgcaggtgtccagcaccacggcctgagctataactgcagcctgccgctggcctttgatggttcttgtagcggtattcaacactttagcgccatgctgcgcgatgaggttggtggcagagcagtgaatctgctgccaagcgaaaccgtgcaagatatctatggcattgtggctaagaaggttaatgaaatcctgcaagcagacgcgattaacggcacggacaacgaggttgtcaccgtgaccgatgaaaacaccggtgagatctcggagaaagtgaaactgggcaccaaagccttggctggccaatggctggcatacggcgttactcgctccgtgaccaagcgttcggtgatgacccttgcttacggcagcaaagagtttggtttccgccaacaggttctggaggatactatccaaccggccatcgactctggtaaaggcctgatgttcacgcagccgaatcaggcagcgggctatatggcgaagctgatttgggaatcggttagcgttaccgttgttgcagcggtggaggctatgaactggctgaaatctgcggcgaagctgttagctgcggaggtgaaggacaagaagacgggcgaaatcctgcgtaagcgctgcgcagtgcattgggttacgccggatggttttccggtatggcaggagtacaaaaagcctattcagacccgtctgaacctgatgtttctgggtcaatttcgtctgcagccgacgatcaacaccaataaggactccgagatcgacgcgcacaaacaggagtctggcatcgcacccaatttcgttcactcacaggacggttcccatctgcgtaagaccgtcgtgtgggcacacgagaagtatggcattgagtcgtttgcattgatccacgattcctttggtaccatcccggcggacgctgcgaacctgtttaaagcggttcgcgaaaccatggttgacacctatgaaagttgcgatgttctggcagacttttatgatcagttcgccgaccaactgcatgagtcccagctggataaaatgccggcgttaccggcgaagggcaacttaaatctccgcgacatcctggaatctgatttcgccttcgcgtaa

SEQ ID NO: 213 - DNA, 2652 bp, synthetic construct
  source 1..2652: mol_type = other DNA
atgaatacaattaacatagctaaaaatgatttcagcgatattgaactggctgcgatcccgtttaataccttggcggaccattatggtgagcgtctggcgcgtgagcaacttgctctggagcacgaatcctacgagatgggtgaagcgcgtttccggaagatgttcgagcgccagcttaaggctggcgaggtggcggataacgctgctgcgaagccgttgattacgaccctgctgccgaaaatgattgcgcgtattaacgattggttcgaggaagtgaaagcaaagcgtggtaaacgtccaaccgcattccagtttctgcaagagatcaagccggaggcggtggcatacattacgatcaaaaccactctcgcatgtctcaccagcgcggaaaatactacggtccaagcggtggccagcgcgattggccgcgcgattgaggacgaagcgcgttttggtcgcattcgtgacctggaagcgaaacattttaagaagaacgttgaagaacaattgaataaagctgtgggccacgtttacaagaaagcgttcatgcaagtcgttgaagctgatatgctgagcaaaggcctgttaggtggtgaagcatggagcagctggcataaggaggactcaattcacgtcggcgtgcggtgcattgaaatgctgatcgaatcgaccggtatggttagcctgcatcgccaaaacgccggcgtggtgggtcaagatagcgaaacgattgaactggcgccagagtacgcggaagctatcgctaccagagccggcgcattggcggggatcagcccgatgttccagccgtgtgttgtaccaccgaagccgtggaccggtatcaccggtggaggttactgggcgaatggtagacgtccgttggcgttggttcgtacccatagcaaaaaggctctgatgcgttatgaagacgtttacatgccggaagtgtacaaagccatcaacatcgcgcagaacactgcgtggaaaatcaacaaaaaggtgttagctgtggcgaacgtaattacaaaatggaagcactgcccggttgaggacatcccggctattgaacgtgaagagctgccaatgaaaccagaggacattgacatgaatccggaggcgctgaccgcatggaaacgtgcggcagcagcggtctatcgtaaggataaagccagaaagagccgtcgtatctccctggaattcatgcttgagcaggcgaacaaattcgctaaccacaaagccatctggtttccgtataatatggattggcgtggtcgtgtttacgcggtatcgatgttcaacccgcagggtaatgacatgaccaagggtttgttgaccttggccaaaggtaaaccgattggcaaagaaggttactattggttgaagatccacggtgcgaactgcgcaggggtggataaggtaccgttcccggaacgtattaaattcatcgaggaaaaccacgaaaacattatggcgtgcgcaaagagcccgctggaaaacacgtggtgggcagagcaggacagtccattctgcttcttggcgttctgtttcgaatatgcaggtgtccagcaccacggcctgagctataactgcagcctgccgctggcctttgatggttcttgtagcggtattcaacactttagcgccatgctgcgcgatgaggttggtggcagagcagtgaatctgctgccaagcgaaaccgtgcaagatatctatggcattgtggctaagaaggttaatgaaatcctgcaagcagacgcgattaacggcacggacaacgaggttgtcaccgtgaccgatgaaaacaccggtgagatctcggagaaagtgaaactgggcaccaaagccttggctggccaatggctggcatacggcgttactcgctccgtgaccaagcgttcggtgatgacccttgcttacggcagcaaagagtttggtttccgccaacaggttctggaggatactatccaaccggccatcgactctggtaaaggcctgatgttcacgcagccgaatcaggcagcgggctatatggcgaagctgatttgggaatcggttagcgttaccgttgttgcagcggtggaggctatgaactggctgaaatctgcggcgaagctgttagctgcggaggtgaaggacaagaagacgggcgaaatcctgcgtaagcgctgcgcagtgcattgggttacgccggatggttttccggtatggcaggagtacaaaaagcctattcagacccgtctgaacctgatgtttctgggtcaatttcgtctgcagccgacgatcaacaccaataaggactccgagatcgacgcgcacaaacaggagtctggcatcgcacccaatttcgttcactcacaggacggttcccatctgcgtaagaccgtcgtgtgggcacacgagaagtatggcattgagtcgtttgcattgatccacgattcctttggtaccatcccggcggacgctgcgaacctgtttaaagcggttcgcgaaaccatggttgacacctatgaaagttgcgatgttctggcagacttttatgatcagttcgccgaccaactgcatgagtcccagctggataaaatgccggcgttaccggcgaagggcaacttaaatctccgcgacatcctggaatctgatttcgccttcgcgtaa

SEQ ID NO: 214 - DNA, 2652 bp, synthetic construct
  source 1..2652: mol_type = other DNA
atgaatacaattaacatagctaaaaatgatttcagcgatattgaactggctgcgatcccgtttaataccttggcggaccattatggtgagcgtctggcgcgtgagcaacttgctctggagcacgaatcctacgagatgggtgaagcgcgtttccggaagatgttcgagcgccagcttaaggctggcgaggtggcggataacgctgctgcgaagccgttgattacgaccctgctgccgaaaatgattgcgcgtattaacgattggttcgaggaagtgaaagcaaagcgtggtaaacgtccaaccgcattccagtttctgcaagagatcaagccggaggcggtggcatacattacgatcaaaaccactctcgcatgtctcaccagcgcggaaaatactacggtccaagcggtggccagcgcgattggccgcgcgattgaggacgaagcgcgttttggtcgcattcgtgacctggaagcgaaacattttaagaagaacgttgaagaacaattgaatgcacgcgtgggccacgttcacaagaaagcgttcatgcaagtcgttgaagctgatatgctgagcaaaggcctgttaggtggtgaagcatggagcagctggcataaggaggactcaattcacgtcggcgtgcggtgcattgaaatgctgatcgaatcgaccggtatggttagcctgcatcgccaaaacgccggcgtggtgggtcaagatagcgaaacgattgaactggcgccagagtacgcggaagctatcgctaccagagccggcgcattggcggggatcagcccgatgttccagccgtgtgttgtaccaccgaagccgtggaccggtatcaccggtggaggttactgggcgaatggtagacgtccgttggcgttggttcgtacccatagcaaaaaggctctgatgcgttatgaagacgtttacatgccggaagtgtacaaagccatcaacatcgcgcagaacactgcgtggaaaatcaacaaaaaggtgttagctgtggcgaacgtaattacaaaatggaagcactgcccggttgaggacatcccggctattgaacgtgaagagctgccaatgaaaccagaggacattgacatgaatccggaggcgctgaccgcatggaaacgtgcggcagcagcggtctatcgtaagtataaagccagaaagagccgtcgtatctccctggaattcatgcttgagcaggcgaacaaattcgctaaccacaaagccatctggtttccgtataatatggattggcgtggtcgtgtttacgcggtatcgatgttcaacccgcagggtaatgacatgaccaagggtttgttgaccttggccaaaggtaaaccgattggcaaagaaggttactattggttgaagatccacggtgcgaactgcgcaggggtggataaggtaccgttcccggaacgtattaaattcatcgaggaaaaccacgaaaacattatggcgtgcgcaaagagcccgctggaaaacacgtggtgggcagagcaggacagtccattctgcttcttggcgttctgtttcgaatatgcaggtgtccagcaccacggcctgagctataactgcagcctgccgctggcctttgatggttcttgtagcggtattcaacactttagcgccatgctgcgcgatgaggttggtggcagagcagtgaatctgctgccaagcgaaaccgtgcaagatatctatggcattgtggctaagaaggttaatgaaatcctgcaagcagacgcgattaacggcacggacaacgaggttgtcaccgtgaccgatgaaaacaccggtgagatctcggagaaagtgaaactgggcaccaaagccttggctggccaatggctggcatacggcgttactcgctccgtgaccaagcgttcggtgatgacccttgcttacggcagcaaagagtttggtttccgccaacaggttctggaggatactatccaaccggccatcgactctggtaaaggcctgatgttcacgcagccgaatcaggcagcgggctatatggcgaagctgatttgggaatcggttagcgttaccgttgttgcagcggtggaggctatgaactggctgaaatctgcggcgaagctgttagctgcggaggtgaaggacaagaagacgggcgaaatcctgcgtaagcgctgcgcagtgcattgggttacgccggatggttttccggtatggcaggagtacaaaaagcctattcagacccgtctgaacctgatgtttctgggtcaatttcgtctgcagccgacgatcaacaccaataaggactccgagatcgacgcgcacaaacaggagtctggcatcgcacccaatttcgttcactcacaggacggttcccatctgcgtaagaccgtcgtgtgggcacacgagaagtatggcattgagtcgtttgcattgatccacgattcctttggtaccatcccggcggacgctgcgaacctgtttaaagcggttcgcgaaaccatggttgacacctatgaaagttgcgatgttctggcagacttttatgatcagttcgccgaccaactgcatgagtcccagctggataaaatgccggcgttaccggcgaagggcaacttaaatctccgcgacatcctggaatctgatttcgccttcgcgtaa

SEQ ID NO: 215 - DNA, 2652 bp, synthetic construct
  source 1..2652: mol_type = other DNA
atgaatacaattaacatagctaaaaatgatttcagcgatattgaactggctgcgatcccgtttaataccttggcggaccattatggtgagcgtctggcgcgtgagcaacttgctctggagcacgaatcctacgagatgggtgaagcgcgtttccggaagatgttcgagcgccagcttaaggctggcgaggtggcggataacgctgctgcgaagccgttgattacgaccctgctgccgaaaatgattgcgcgtattaacgattggttcgaggaagtgaaagcaaagcgtggtaaacgtccaaccgcattccagtttctgcaagagatcaagccggaggcggtggcatacattacgatcaaaaccactctcgcatgtctcaccagcgcggaaaatactacggtccaagcggtggccagcgcgattggccgcgcgattgaggacgaagcgcgttttggtcgcattcgtgacctggaagcgaaacattttaagaagaacgttgaagaacaattgaatgcaggtgtgggccacgttcacaagaaagcgttcatgcaagtcgttgaagctgatatgctgagcaaaggcctgttaggtggtgaagcatggagcagctggcataaggaggactcaattcacgtcggcgtgcggtgcattgaaatgctgatcgaatcgaccggtatggttagcctgcatcgccaaaacgccggcgtggtgggtcaagatagcgaaacgattgaactggcgccagagtacgcggaagctatcgctaccagagccggcgcattggcggggatcagcccgatgttccagccgtgtgttgtaccaccgaagccgtggaccggtatcaccggtggaggttactgggcgaatggtagacgtccgttggcgttggttcgtacccatagcaaaaaggctctgatgcgttatgaagacgtttacatgccggaagtgtacaaagccatcaacatcgcgcagaacactgcgtggaaaatcaacaaaaaggtgttagctgtggcgaacgtaattacaaaatggaagcactgcccggttgaggacatcccggctattgaacgtgaagagctgccaatgaaaccagaggacattgacatgaatccggaggcgctgaccgcatggaaacgtgcggcagcagcggtctatcgtaaggataaagccagaaagagccgtcgtatctccctggaattcatgcttgagcaggcgaacaaattcgctaaccacaaagccatctggtttccgtataatatggattggcgtggtcgtgtttacgcggtatcgatgttcaacccgcagggtaatgacatgaccaagggtttgttgaccttggccaaaggtaaaccgattggcaaagaaggttactattggttgaagatccacggtgcgaactgcgcaggggtggataaggtaccgttcccggaacgtattaaattcatcgaggaaaaccacgaaaacattatggcgtgcgcaaagagcccgctggaaaacacgtggtgggcagagcaggacagtccattctgcttcttggcgttctgtttcgaatatgcaggtgtccagcaccacggcctgagctataactgcagcctgccgctggcctttgatggttcttgtagcggtattcaacactttagcgccatgctgcgcgatgaggttggtggcagagcagtgaatctgctgccaagcgaaaccgtgcaagatatctatggcattgtggctaagaaggttaatgaaatcctgcaagcagacgcgattaacggcacggacaacgaggttgtcaccgtgaccgatgaaaacaccggtgagatctcggagaaagtgaaactgggcaccaaagccttggctggccaatggctggcatacggcgttactcgctccgtgaccaagcgttcggtgatgacccttgcttacggcagcaaagagtttggtttccgccaacaggttctggaggatactatccaaccggccatcgactctggtaaaggcctgatgttcacgcagccgaatcaggcagcgggctatatggcgaagctgatttgggaatcggttagcgttaccgttgttgcagcggtggaggctatgaactggctgaaatctgcggcgaagctgttagctgcggaggtgaaggacaagaagacgggcgaaatcctgcgtaagcgctgcgcagtgcattgggttacgccggatggttttccggtatggcaggagtacaaaaagcctattcagacccgtctgaacctgatgtttctgggtcaatttcgtctgcagccgacgatcaacaccaataaggactccgagatcgacgcgcacaaacaggagtctggcatcgcacccaatttcgttcactcacaggacggttcccatctgcgtaagaccgtcgtgtgggcacacgagaagtatggcattgagtcgtttgcattgatccacgattcctttggtaccatcccggcggacgctgcgaacctgtttaaagcggttcgcgaaaccatggttgacacctatgaaagttgcgatgttctggcagacttttatgatcagttcgccgaccaactgcatgagtcccagctggataaaatgccggcgttaccggcgaagggcaacttaaatctccgcgacatcctggaatctgatttcgccttcgcgtaa

SEQ ID NO: 216 - DNA, 2652 bp, synthetic construct
  source 1..2652: mol_type = other DNA
atgaatacaattaacatagctaaaaatgatttcagcgatattgaactggctgcgatcccgtttaataccttggcggaccattatggtgagcgtctggcgcgtgagcaacttgctctggagcacgaatcctacgagatgggtgaagcgcgtttccggaagatgttcgagcgccagcttaaggctggcgaggtggcggataacgctgctgcgaagccgttgattacgaccctgctgccgaaaatgattgcgcgtattaacgattggttcgaggaagtgaaagcaaagcgtggtaaacgtccaaccgcattccagtttctgcaagagatcaagccggaggcggtggcatacattacgatcaaaaccactctcgcatgtctcaccagcgcggataatactacggtccaagcggtggccagcgcgattggccgcgcgattgaggacgaagcgcgttttggtcgcattcgtgacctggaagcgaaacattttaagaagaacgttgaagaacaattgaatgcacgcgtgggccacgttcacaagaaagcgttcatgcaagtcgttgaagctgatatgctgagcaaaggcctgttaggtggtgaagcatggagcagctggcataaggaggactcaattcacgtcggcgtgcggtgcattgaaatgctgatcgaatcgaccggtatggttagcctgcatcgccaaaacgccggcgtggtgggtcaagatagcgaaacgattgaactggcgccagagtacgcggaagctatcgctaccagagccggcgcattggcggggatcagcccgatgttccagccgtgtgttgtaccaccgaagccgtggaccggtatcaccggtggaggttactgggcgaatggtagacgtccgttggcgttggttcgtacccatagcaaaaaggctctgatgcgttatgaagacgtttacatgccggaagtgtacaaagccatcaacatcgcgcagaacactgcgtggaaaatcaacaaaaaggtgttagctgtggcgaacgtaattacaaaatggaagcactgcccggttgaggacatcccggctattgaacgtgaagagctgccaatgaaaccagaggacattgacatgaatccggaggcgctgaccgcatggaaacgtgcggcagcagcggtctatcgtaagtataaagccagaaagagccgtcgtatctccctggaattcatgcttgagcaggcgaacaaattcgctaaccacaaagccatctggtttccgtataatatggattggcgtggtcgtgtttacgcggtatcgatgttcaacccgcagggtaatgacatgaccaagggtttgttgaccttggccaaaggtaaaccgattggcaaagaaggttactattggttgaagatccacggtgcgaactgcgcaggggtggataaggtaccgttcccggaacgtattaaattcatcgaggaaaaccacgaaaacattatggcgtgcgcaaagagcccgctggaaaacacgtggtgggcagagcaggacagtccattctgcttcttggcgttctgtttcgaatatgcaggtgtccagcaccacggcctgagctataactgcagcctgccgctggcctttgatggttcttgtagcggtattcaacactttagcgccatgctgcgcgatgaggttggtggcagagcagtgaatctgctgccaagcgaaaccgtgcaagatatctatggcattgtggctaagaaggttaatgaaatcctgcaagcagacgcgattaacggcacggacaacgaggttgtcaccgtgaccgatgaaaacaccggtgagatctcggagaaagtgaaactgggcaccaaagccttggctggccaatggctggcatacggcgttactcgctccgtgaccaagcgttcggtgatgacccttgcttacggcagcaaagagtttggtttccgccaacaggttctggaggatactatccaaccggccatcgactctggtaaaggcctgatgttcacgcagccgaatcaggcagcgggctatatggcgaagctgatttgggaatcggttagcgttaccgttgttgcagcggtggaggctatgaactggctgaaatctgcggcgaagctgttagctgcggaggtgaaggacaagaagacgggcgaaatcctgcgtaagcgctgcgcagtgcattgggttacgccggatggttttccggtatggcaggagtacaaaaagcctattcagacccgtctgaacctgatgtttctgggtcaatttcgtctgcagccgacgatcaacaccaataaggactccgagatcgacgcgcacaaacaggagtctggcatcgcacccaatttcgttcactcacaggacggttcccatctgcgtaagaccgtcgtgtgggcacacgagaagtatggcattgagtcgtttgcattgatccacgattcctttggtaccatcccggcggacgctgcgaacctgtttaaagcggttcgcgaaaccatggttgacacctatgaaagttgcgatgttctggcagacttttatgatcagttcgccgaccaactgcatgagtcccagctggataaaatgccggcgttaccggcgaagggcaacttaaatctccgcgacatcctggaatctgatttcgccttcgcgtaa

SEQ ID NO: 217 - DNA, 2652 bp, synthetic construct
  source 1..2652: mol_type = other DNA
atgaatacaattaacatagctaaaaatgatttcagcgatattgaactggctgcgatcccgtttaataccttggcggaccattatggtgagcgtctggcgcgtgagcaacttgctctggagcacgaatcctacgagatgggtgaagcgcgtttccggaagatgttcgagcgccagcttaaggctggcgaggtggcggataacgctgctgcgaagccgttgattacgaccctgctgccgaaaatgattgcgcgtattaacgattggttcgaggaagtgaaagcaaagcgtggtaaacgtccaaccgcattccagtttctgcaagagatcaagccggaggcggtggcatacattacgatcaaaaccactctcgcatgtctcaccagcgcggaaaatactacggtccaagcggtggccagcgcgattggccgcgcgattgaggacgaagcgcgttttggtcgcattcgtgacctggaagcgaaacattttaagaagaacgttgaagaacaattgaatggacgcgtgggccacgtttacaagaaagcgttcatgcaagtcgttgaagctgatatgctgagcaaaggcctgttaggtggtgaagcatggagcagctggcataaggaggactcaattcacgtcggcgtgcggtgcattgaaatgctgatcgaatcgaccggtatggttagcctgcatcgccaaaacgccggcgtggtgggtcaagatagcgaaacgattgaactggcgccagagtacgcggaagctatcgctaccagagccggcgcattggcggggatcagcccgatgttccagccgtgtgttgtaccaccgaagccgtggaccggtatcaccggtggaggttactgggcgaatggtagacgtccgttggcgttggttcgtacccatagcaaaaaggctctgatgcgttatgaagacgtttacatgccggaagtgtacaaagccatcaacatcgcgcagaacactgcgtggaaaatcaacaaaaaggtgttagctgtggcgaacgtaattacaaaatggaagcactgcccggttgaggacatcccggctattgaacgtgaagagctgccaatgaaaccagaggacattgacatgaatccggaggcgctgaccgcatggaaacgtgcggcagcagcggtctatcgtaagtataaagccagaaagagccgtcgtatctccctggaattcatgcttgagcaggcgaacaaattcgctaaccacaaagccatctggtttccgtataatatggattggcgtggtcgtgtttacgcggtatcgatgttcaacccgcagggtaatgacatgaccaagggtttgttgaccttggccaaaggtaaaccgattggcaaagaaggttactattggttgaagatccacggtgcgaactgcgcaggggtggataaggtaccgttcccggaacgtattaaattcatcgaggaaaaccacgaaaacattatggcgtgcgcaaagagcccgctggaaaacacgtggtgggcagagcaggacagtccattctgcttcttggcgttctgtttcgaatatgcaggtgtccagcaccacggcctgagctataactgcagcctgccgctggcctttgatggttcttgtagcggtattcaacactttagcgccatgctgcgcgatgaggttggtggcagagcagtgaatctgctgccaagcgaaaccgtgcaagatatctatggcattgtggctaagaaggttaatgaaatcctgcaagcagacgcgattaacggcacggacaacgaggttgtcaccgtgaccgatgaaaacaccggtgagatctcggagaaagtgaaactgggcaccaaagccttggctggccaatggctggcatacggcgttactcgctccgtgaccaagcgttcggtgatgacccttgcttacggcagcaaagagtttggtttccgccaacaggttctggaggatactatccaaccggccatcgactctggtaaaggcctgatgttcacgcagccgaatcaggcagcgggctatatggcgaagctgatttgggaatcggttagcgttaccgttgttgcagcggtggaggctatgaactggctgaaatctgcggcgaagctgttagctgcggaggtgaaggacaagaagacgggcgaaatcctgcgtaagcgctgcgcagtgcattgggttacgccggatggttttccggtatggcaggagtacaaaaagcctattcagacccgtctgaacctgatgtttctgggtcaatttcgtctgcagccgacgatcaacaccaataaggactccgagatcgacgcgcacaaacaggagtctggcatcgcacccaatttcgttcactcacaggacggttcccatctgcgtaagaccgtcgtgtgggcacacgagaagtatggcattgagtcgtttgcattgatccacgattcctttggtaccatcccggcggacgctgcgaacctgtttaaagcggttcgcgaaaccatggttgacacctatgaaagttgcgatgttctggcagacttttatgatcagttcgccgaccaactgcatgagtcccagctggataaaatgccggcgttaccggcgaagggcaacttaaatctccgcgacatcctggaatctgatttcgccttcgcgtaa

SEQ ID NO: 218 - DNA, 2652 bp, synthetic construct
  source 1..2652: mol_type = other DNA
atgaatacaattaacatagctaaaaatgatttcagcgatattgaactggctgcgatcccgtttaataccttggcggaccattatggtgagcgtctggcgcgtgagcaacttgctctggagcacgaatcctacgagatgggtgaagcgcgtttccggaagatgttcgagcgccagcttaaggctggcgaggtggcggataacgctgctgcgaagccgttgattacgaccctgctgccgaaaatgattgcgcgtattaacgattggttcgaggaagtgaaagcaaagcgtggtaaacgtccaaccgcattccagtttctgcaagagatcaagccggaggcggtggcatacattacgatcaaaaccactctcgcatgtctcaccagcgcggaaaatactacggtccaagcggtggccagcgcgattggccgcgcgattgaggacgaagcgcgttttggtcgcattcgtgacctggaagcgaaacattttaagaagaacgttgaagaacaattgaatgcatgtgtgggccacgttcacaagaaagcgttcatgcaagtcgttgaagctgatatgctgagcaaaggcctgttaggtggtgaagcatggagcagctggcataaggaggactcaattcacgtcggcgtgcggtgcattgaaatgctgatcgaatcgaccggtatggttagcctgcatcgccaaaacgccggcgtggtgggtcaagatagcgaaacgattgaactggcgccagagtacgcggaagctatcgctaccagagccggcgcattggcggggatcagcccgatgttccagccgtgtgttgtaccaccgaagccgtggaccggtatcaccggtggaggttactgggcgaatggtagacgtccgttggcgttggttcgtacccatagcaaaaaggctctgatgcgttatgaagacgtttacatgccggaagtgtacaaagccatcaacatcgcgcagaacactgcgtggaaaatcaacaaaaaggtgttagctgtggcgaacgtaattacaaaatggaagcactgcccggttgaggacatcccggctattgaacgtgaagagctgccaatgaaaccagaggacattgacatgaatccggaggcgctgaccgcatggaaacgtgcggcagcagcggtctatcgtaagtataaagccagaaagagccgtcgtatctccctggaattcatgcttgagcaggcgaacaaattcgctaaccacaaagccatctggtttccgtataatatggattggcgtggtcgtgtttacgcggtatcgatgttcaacccgcagggtaatgacatgaccaagggtttgttgaccttggccaaaggtaaaccgattggcaaagaaggttactattggttgaagatccacggtgcgaactgcgcaggggtggataaggtaccgttcccggaacgtattaaattcatcgaggaaaaccacgaaaacattatggcgtgcgcaaagagcccgctggaaaacacgtggtgggcagagcaggacagtccattctgcttcttggcgttctgtttcgaatatgcaggtgtccagcaccacggcctgagctataactgcagcctgccgctggcctttgatggttcttgtagcggtattcaacactttagcgccatgctgcgcgatgaggttggtggcagagcagtgaatctgctgccaagcgaaaccgtgcaagatatctatggcattgtggctaagaaggttaatgaaatcctgcaagcagacgcgattaacggcacggacaacgaggttgtcaccgtgaccgatgaaaacaccggtgagatctcggagaaagtgaaactgggcaccaaagccttggctggccaatggctggcatacggcgttactcgctccgtgaccaagcgttcggtgatgacccttgcttacggcagcaaagagtttggtttccgccaacaggttctggaggatactatccaaccggccatcgactctggtaaaggcctgatgttcacgcagccgaatcaggcagcgggctatatggcgaagctgatttgggaatcggttagcgttaccgttgttgcagcggtggaggctatgaactggctgaaatctgcggcgaagctgttagctgcggaggtgaaggacaagaagacgggcgaaatcctgcgtaagcgctgcgcagtgcattgggttacgccggatggttttccggtatggcaggagtacaaaaagcctattcagacccgtctgaacctgatgtttctgggtcaatttcgtctgcagccgacgatcaacaccaataaggactccgagatcgacgcgcacaaacaggagtctggcatcgcacccaatttcgttcactcacaggacggttcccatctgcgtaagaccgtcgtgtgggcacacgagaagtatggcattgagtcgtttgcattgatccacgattcctttggtaccatcccggcggacgctgcgaacctgtttaaagcggttcgcgaaaccatggttgacacctatgaaagttgcgatgttctggcagacttttatgatcagttcgccgaccaactgcatgagtcccagctggataaaatgccggcgttaccggcgaagggcaacttaaatctccgcgacatcctggaatctgatttcgccttcgcgtaa

SEQ ID NO: 219 - DNA, 2652 bp, synthetic construct
  source 1..2652: mol_type = other DNA
atgaatacaattaacatagctaaaaatgatttcagcgatattgaactggctgcgatcccgtttaataccttggcggaccattatggtgagcgtctggcgcgtgagcaacttgctctggagcacgaatcctacgagatgggtgaagcgcgtttccggaagatgttcgagcgccagcttaaggctggcgaggtggcggataacgctgctgcgaagccgttgattacgaccctgctgccgaaaatgattgcgcgtattaacgattggttcgaggaagtgaaagcaaagcgtggtaaacgtccaaccgcattccagtttctgcaagagatcaagccggaggcggtggcatacattacgatcaaaaccactctcgcatgtctcaccagcgcggaaaatactacggtccaagcggtggccagcgcgattggccgcgcgattgaggacgaagcgcgttttggtcgcattcgtgacctggaagcgaaacattttaagaagaacgttgaagaacaattgaatggatgtgtgggccacgttcacaagaaagcgttcatgcaagtcgttgaagctgatatgctgagcaaaggcctgttaggtggtgaagcatggagcagctggcataaggaggactcaattcacgtcggcgtgcggtgcattgaaatgctgatcgaatcgaccggtatggttagcctgcatcgccaaaacgccggcgtggtgggtcaagatagcgaaacgattgaactggcgccagagtacgcggaagctatcgctaccagagccggcgcattggcggggatcagcccgatgttccagccgtgtgttgtaccaccgaagccgtggaccggtatcaccggtggaggttactgggcgaatggtagacgtccgttggcgttggttcgtacccatagcaaaaaggctctgatgcgttatgaagacgtttacatgccggaagtgtacaaagccatcaacatcgcgcagaacactgcgtggaaaatcaacaaaaaggtgttagctgtggcgaacgtaattacaaaatggaagcactgcccggttgaggacatcccggctattgaacgtgaagagctgccaatgaaaccagaggacattgacatgaatccggaggcgctgaccgcatggaaacgtgcggcagcagcggtctatcgtaagggtaaagccagaaagagccgtcgtatctccctggaattcatgcttgagcaggcgaacaaattcgctaaccacaaagccatctggtttccgtataatatggattggcgtggtcgtgtttacgcggtatcgatgttcaacccgcagggtaatgacatgaccaagggtttgttgaccttggccaaaggtaaaccgattggcaaagaaggttactattggttgaagatccacggtgcgaactgcgcaggggtggataaggtaccgttcccggaacgtattaaattcatcgaggaaaaccacgaaaacattatggcgtgcgcaaagagcccgctggaaaacacgtggtgggcagagcaggacagtccattctgcttcttggcgttctgtttcgaatatgcaggtgtccagcaccacggcctgagctataactgcagcctgccgctggcctttgatggttcttgtagcggtattcaacactttagcgccatgctgcgcgatgaggttggtggcagagcagtgaatctgctgccaagcgaaaccgtgcaagatatctatggcattgtggctaagaaggttaatgaaatcctgcaagcagacgcgattaacggcacggacaacgaggttgtcaccgtgaccgatgaaaacaccggtgagatctcggagaaagtgaaactgggcaccaaagccttggctggccaatggctggcatacggcgttactcgctccgtgaccaagcgttcggtgatgacccttgcttacggcagcaaagagtttggtttccgccaacaggttctggaggatactatccaaccggccatcgactctggtaaaggcctgatgttcacgcagccgaatcaggcagcgggctatatggcgaagctgatttgggaatcggttagcgttaccgttgttgcagcggtggaggctatgaactggctgaaatctgcggcgaagctgttagctgcggaggtgaaggacaagaagacgggcgaaatcctgcgtaagcgctgcgcagtgcattgggttacgccggatggttttccggtatggcaggagtacaaaaagcctattcagacccgtctgaacctgatgtttctgggtcaatttcgtctgcagccgacgatcaacaccaataaggactccgagatcgacgcgcacaaacaggagtctggcatcgcacccaatttcgttcactcacaggacggttcccatctgcgtaagaccgtcgtgtgggcacacgagaagtatggcattgagtcgtttgcattgatccacgattcctttggtaccatcccggcggacgctgcgaacctgtttaaagcggttcgcgaaaccatggttgacacctatgaaagttgcgatgttctggcagacttttatgatcagttcgccgaccaactgcatgagtcccagctggataaaatgccggcgttaccggcgaagggcaacttaaatctccgcgacatcctggaatctgatttcgccttcgcgtaa

SEQ ID NO: 220 - DNA, 2652 bp, synthetic construct
  source 1..2652: mol_type = other DNA
atgaatacaattaacatagctaaaaatgatttcagcgatattgaactggctgcgatcccgtttaataccttggcggaccattatggtgagcgtctggcgcgtgagcaacttgctctggagcacgaatcctacgagatgggtgaagcgcgtttccggaagatgttcgagcgccagcttaaggctggcgaggtggcggataacgctgctgcgaagccgttgattacgaccctgctgccgaaaatgattgcgcgtattaacgattggttcgaggaagtgaaagcaaagcgtggtaaacgtccaaccgcattccagtttctgcaagagatcaagccggaggcggtggcatacattacgatcaaaaccactctcgcatgtctcaccagcgcggaaaatactacggtccaagcggtggccagcgcgattggccgcgcgattgaggacgaagcgcgttttggtcgcattcgtgacctggaagcgaaacattttaagaagaacgttgaagaacaattgaatgcaggtgtgggccacgtttacaagaaagcgttcatgcaagtcgttgaagctgatatgctgagcaaaggcctgttaggtggtgaagcatggagcagctggcataaggaggactcaattcacgtcggcgtgcggtgcattgaaatgctgatcgaatcgaccggtatggttagcctgcatcgccaaaacgccggcgtggtgggtcaagatagcgaaacgattgaactggcgccagagtacgcggaagctatcgctaccagagccggcgcattggcggggatcagcccgatgttccagccgtgtgttgtaccaccgaagccgtggaccggtatcaccggtggaggttactgggcgaatggtagacgtccgttggcgttggttcgtacccatagcaaaaaggctctgatgcgttatgaagacgtttacatgccggaagtgtacaaagccatcaacatcgcgcagaacactgcgtggaaaatcaacaaaaaggtgttagctgtggcgaacgtaattacaaaatggaagcactgcccggttgaggacatcccggctattgaacgtgaagagctgccaatgaaaccagaggacattgacatgaatccggaggcgctgaccgcatggaaacgtgcggcagcagcggtctatcgtaagtataaagccagaaagagccgtcgtatctccctggaattcatgcttgagcaggcgaacaaattcgctaaccacaaagccatctggtttccgtataatatggattggcgtggtcgtgtttacgcggtatcgatgttcaacccgcagggtaatgacatgaccaagggtttgttgaccttggccaaaggtaaaccgattggcaaagaaggttactattggttgaagatccacggtgcgaactgcgcaggggtggataaggtaccgttcccggaacgtattaaattcatcgaggaaaaccacgaaaacattatggcgtgcgcaaagagcccgctggaaaacacgtggtgggcagagcaggacagtccattctgcttcttggcgttctgtttcgaatatgcaggtgtccagcaccacggcctgagctataactgcagcctgccgctggcctttgatggttcttgtagcggtattcaacactttagcgccatgctgcgcgatgaggttggtggcagagcagtgaatctgctgccaagcgaaaccgtgcaagatatctatggcattgtggctaagaaggttaatgaaatcctgcaagcagacgcgattaacggcacggacaacgaggttgtcaccgtgaccgatgaaaacaccggtgagatctcggagaaagtgaaactgggcaccaaagccttggctggccaatggctggcatacggcgttactcgctccgtgaccaagcgttcggtgatgacccttgcttacggcagcaaagagtttggtttccgccaacaggttctggaggatactatccaaccggccatcgactctggtaaaggcctgatgttcacgcagccgaatcaggcagcgggctatatggcgaagctgatttgggaatcggttagcgttaccgttgttgcagcggtggaggctatgaactggctgaaatctgcggcgaagctgttagctgcggaggtgaaggacaagaagacgggcgaaatcctgcgtaagcgctgcgcagtgcattgggttacgccggatggttttccggtatggcaggagtacaaaaagcctattcagacccgtctgaacctgatgtttctgggtcaatttcgtctgcagccgacgatcaacaccaataaggactccgagatcgacgcgcacaaacaggagtctggcatcgcacccaatttcgttcactcacaggacggttcccatctgcgtaagaccgtcgtgtgggcacacgagaagtatggcattgagtcgtttgcattgatccacgattcctttggtaccatcccggcggacgctgcgaacctgtttaaagcggttcgcgaaaccatggttgacacctatgaaagttgcgatgttctggcagacttttatgatcagttcgccgaccaactgcatgagtcccagctggataaaatgccggcgttaccggcgaagggcaacttaaatctccgcgacatcctggaatctgatttcgccttcgcgtaa

SEQ ID NO: 221 - DNA, 2652 bp, synthetic construct
  source 1..2652: mol_type = other DNA
atgaatacaattaacatagctaaaaatgatttcagcgatattgaactggctgcgatcccgtttaataccttggcggaccattatggtgagcgtctggcgcgtgagcaacttgctctggagcacgaatcctacgagatgggtgaagcgcgtttccggaagatgttcgagcgccagcttaaggctggcgaggtggcggataacgctgctgcgaagccgttgattacgaccctgctgccgaaaatgattgcgcgtattaacgattggttcgaggaagtgaaagcaaagcgtggtaaacgtccaaccgcattccagtttctgcaagagatcaagccggaggcggtggcatacattacgatcaaaaccactctcgcatgtctcaccagcgcggataatactacggtccaagcggtggccagcgcgattggccgcgcgattgaggacgaagcgcgttttggtcgcattcgtgacctggaagcgaaacattttaagaagaacgttgaagaacaattgaatgcatgtgtgggccacgtttacaagaaagcgttcatgcaagtcgttgaagctgatatgctgagcaaaggcctgttaggtggtgaagcatggagcagctggcataaggaggactcaattcacgtcggcgtgcggtgcattgaaatgctgatcgaatcgaccggtatggttagcctgcatcgccaaaacgccggcgtggtgggtcaagatagcgaaacgattgaactggcgccagagtacgcggaagctatcgctaccagagccggcgcattggcggggatcagcccgatgttccagccgtgtgttgtaccaccgaagccgtggaccggtatcaccggtggaggttactgggcgaatggtagacgtccgttggcgttggttcgtacccatagcaaaaaggctctgatgcgttatgaagacgtttacatgccggaagtgtacaaagccatcaacatcgcgcagaacactgcgtggaaaatcaacaaaaaggtgttagctgtggcgaacgtaattacaaaatggaagcactgcccggttgaggacatcccggctattgaacgtgaagagctgccaatgaaaccagaggacattgacatgaatccggaggcgctgaccgcatggaaacgtgcggcagcagcggtctatcgtaagtataaagccagaaagagccgtcgtatctccctggaattcatgcttgagcaggcgaacaaattcgctaaccacaaagccatctggtttccgtataatatggattggcgtggtcgtgtttacgcggtatcgatgttcaacccgcagggtaatgacatgaccaagggtttgttgaccttggccaaaggtaaaccgattggcaaagaaggttactattggttgaagatccacggtgcgaactgcgcaggggtggataaggtaccgttcccggaacgtattaaattcatcgaggaaaaccacgaaaacattatggcgtgcgcaaagagcccgctggaaaacacgtggtgggcagagcaggacagtccattctgcttcttggcgttctgtttcgaatatgcaggtgtccagcaccacggcctgagctataactgcagcctgccgctggcctttgatggttcttgtagcggtattcaacactttagcgccatgctgcgcgatgaggttggtggcagagcagtgaatctgctgccaagcgaaaccgtgcaagatatctatggcattgtggctaagaaggttaatgaaatcctgcaagcagacgcgattaacggcacggacaacgaggttgtcaccgtgaccgatgaaaacaccggtgagatctcggagaaagtgaaactgggcaccaaagccttggctggccaatggctggcatacggcgttactcgctccgtgaccaagcgttcggtgatgacccttgcttacggcagcaaagagtttggtttccgccaacaggttctggaggatactatccaaccggccatcgactctggtaaaggcctgatgttcacgcagccgaatcaggcagcgggctatatggcgaagctgatttgggaatcggttagcgttaccgttgttgcagcggtggaggctatgaactggctgaaatctgcggcgaagctgttagctgcggaggtgaaggacaagaagacgggcgaaatcctgcgtaagcgctgcgcagtgcattgggttacgccggatggttttccggtatggcaggagtacaaaaagcctattcagacccgtctgaacctgatgtttctgggtcaatttcgtctgcagccgacgatcaacaccaataaggactccgagatcgacgcgcacaaacaggagtctggcatcgcacccaatttcgttcactcacaggacggttcccatctgcgtaagaccgtcgtgtgggcacacgagaagtatggcattgagtcgtttgcattgatccacgattcctttggtaccatcccggcggacgctgcgaacctgtttaaagcggttcgcgaaaccatggttgacacctatgaaagttgcgatgttctggcagacttttatgatcagttcgccgaccaactgcatgagtcccagctggataaaatgccggcgttaccggcgaagggcaacttaaatctccgcgacatcctggaatctgatttcgccttcgcgtaa

SEQ ID NO: 222 - DNA, 2652 bp, synthetic construct
  source 1..2652: mol_type = other DNA
atgaatacaattaacatagctaaaaatgatttcagcgatattgaactggctgcgatcccgtttaataccttggcggaccattatggtgagcgtctggcgcgtgagcaacttgctctggagcacgaatcctacgagatgggtgaagcgcgtttccggaagatgttcgagcgccagcttaaggctggcgaggtggcggataacgctgctgcgaagccgttgattacgaccctgctgccgaaaatgattgcgcgtattaacgattggttcgaggaagtgaaagcaaagcgtggtaaacgtccaaccgcattccagtttctgcaagagatcaagccggaggcggtggcatacattacgatcaaaaccactctcgcatgtctcaccagcgcggataatactacggtccaagcggtggccagcgcgattggccgcgcgattgaggacgaagcgcgttttggtcgcattcgtgacctggaagcgaaacattttaagaagaacgttgaagaacaattgaatgcagctgtgggccacgtttacaagaaagcgttcatgcaagtcgttgaagctgatatgctgagcaaaggcctgttaggtggtgaagcatggagcagctggcataaggaggactcaattcacgtcggcgtgcggtgcattgaaatgctgatcgaatcgaccggtatggttagcctgcatcgccaaaacgccggcgtggtgggtcaagatagcgaaacgattgaactggcgccagagtacgcggaagctatcgctaccagagccggcgcattggcggggatcagcccgatgttccagccgtgtgttgtaccaccgaagccgtggaccggtatcaccggtggaggttactgggcgaatggtagacgtccgttggcgttggttcgtacccatagcaaaaaggctctgatgcgttatgaagacgtttacatgccggaagtgtacaaagccatcaacatcgcgcagaacactgcgtggaaaatcaacaaaaaggtgttagctgtggcgaacgtaattacaaaatggaagcactgcccggttgaggacatcccggctattgaacgtgaagagctgccaatgaaaccagaggacattgacatgaatccggaggcgctgaccgcatggaaacgtgcggcagcagcggtctatcgtaagtataaagccagaaagagccgtcgtatctccctggaattcatgcttgagcaggcgaacaaattcgctaaccacaaagccatctggtttccgtataatatggattggcgtggtcgtgtttacgcggtatcgatgttcaacccgcagggtaatgacatgaccaagggtttgttgaccttggccaaaggtaaaccgattggcaaagaaggttactattggttgaagatccacggtgcgaactgcgcaggggtggataaggtaccgttcccggaacgtattaaattcatcgaggaaaaccacgaaaacattatggcgtgcgcaaagagcccgctggaaaacacgtggtgggcagagcaggacagtccattctgcttcttggcgttctgtttcgaatatgcaggtgtccagcaccacggcctgagctataactgcagcctgccgctggcctttgatggttcttgtagcggtattcaacactttagcgccatgctgcgcgatgaggttggtggcagagcagtgaatctgctgccaagcgaaaccgtgcaagatatctatggcattgtggctaagaaggttaatgaaatcctgcaagcagacgcgattaacggcacggacaacgaggttgtcaccgtgaccgatgaaaacaccggtgagatctcggagaaagtgaaactgggcaccaaagccttggctggccaatggctggcatacggcgttactcgctccgtgaccaagcgttcggtgatgacccttgcttacggcagcaaagagtttggtttccgccaacaggttctggaggatactatccaaccggccatcgactctggtaaaggcctgatgttcacgcagccgaatcaggcagcgggctatatggcgaagctgatttgggaatcggttagcgttaccgttgttgcagcggtggaggctatgaactggctgaaatctgcggcgaagctgttagctgcggaggtgaaggacaagaagacgggcgaaatcctgcgtaagcgctgcgcagtgcattgggttacgccggatggttttccggtatggcaggagtacaaaaagcctattcagacccgtctgaacctgatgtttctgggtcaatttcgtctgcagccgacgatcaacaccaataaggactccgagatcgacgcgcacaaacaggagtctggcatcgcacccaatttcgttcactcacaggacggttcccatctgcgtaagaccgtcgtgtgggcacacgagaagtatggcattgagtcgtttgcattgatccacgattcctttggtaccatcccggcggacgctgcgaacctgtttaaagcggttcgcgaaaccatggttgacacctatgaaagttgcgatgttctggcagacttttatgatcagttcgccgaccaactgcatgagtcccagctggataaaatgccggcgttaccggcgaagggcaacttaaatctccgcgacatcctggaatctgatttcgccttcgcgtaa

SEQ ID NO: 223 - DNA, 2649 bp, synthetic construct
  source 1..2649: mol_type = other DNA
atgaatacaattaacatagctaaaaatgatttcagcgatattgaactggctgcgatcccgtttaataccttggcggaccattatggtgagcgtctggcgcgtgagcaacttgctctggagcacgaatcctacgagatgggtgaagcgcgtttccggaagatgttcgagcgccagcttaaggctggcgaggtggcggataacgctgctgcgaagccgttgattacgaccctgctgccgaaaatgattgcgcgtattaacgattggttcgaggaagtgaaagcaaagcgtggtaaacgtccaaccgcattccagtttctgcaagagatcaagccggaggcggtggcatacattacgatcaaaaccactctcgcatgtctcaccagcgcggataatactacggtccaagcggtggccagcgcgattggccgcgcgattgaggacgaagcgcgttttggtcgcattcgtgacctggaagcgaaacattttaagaagaacgttgaagaacaattgaatcgcgtgggccacgtttacaagaaagcgttcatgcaagtcgttgaagctgatatgctgagcaaaggcctgttaggtggtgaagcatggagcagctggcataaggaggactcaattcacgtcggcgtgcggtgcattgaaatgctgatcgaatcgaccggtatggttagcctgcatcgccaaaacgccggcgtggtgggtcaagatagcgaaacgattgaactggcgccagagtacgcggaagctatcgctaccagagccggcgcattggcggggatcagcccgatgttccagccgtgtgttgtaccaccgaagccgtggaccggtatcaccggtggaggttactgggcgaatggtagacgtccgttggcgttggttcgtacccatagcaaaaaggctctgatgcgttatgaagacgtttacatgccggaagtgtacaaagccatcaacatcgcgcagaacactgcgtggaaaatcaacaaaaaggtgttagctgtggcgaacgtaattacaaaatggaagcactgcccggttgaggacatcccggctattgaacgtgaagagctgccaatgaaaccagaggacattgacatgaatccggaggcgctgaccgcatggaaacgtgcggcagcagcggtctatcgtggggataaagccagaaagagccgtcgtatctccctggaattcatgcttgagcaggcgaacaaattcgctaaccacaaagccatctggtttccgtataatatggattggcgtggtcgtgtttacgcggtatcgatgttcaacccgcagggtaatgacatgaccaagggtttgttgaccttggccaaaggtaaaccgattggcaaagaaggttactattggttgaagatccacggtgcgaactgcgcaggggtggataaggtaccgttcccggaacgtattaaattcatcgaggaaaaccacgaaaacattatggcgtgcgcaaagagcccgctggaaaacacgtggtgggcagagcaggacagtccattctgcttcttggcgttctgtttcgaatatgcaggtgtccagcaccacggcctgagctataactgcagcctgccgctggcctttgatggttcttgtagcggtattcaacactttagcgccatgctgcgcgatgaggttggtggcagagcagtgaatctgctgccaagcgaaaccgtgcaagatatctatggcattgtggctaagaaggttaatgaaatcctgcaagcagacgcgattaacggcacggacaacgaggttgtcaccgtgaccgatgaaaacaccggtgagatctcggagaaagtgaaactgggcaccaaagccttggctggccaatggctggcatacggcgttactcgctccgtgaccaagcgttcggtgatgacccttgcttacggcagcaaagagtttggtttccgccaacaggttctggaggatactatccaaccggccatcgactctggtaaaggcctgatgttcacgcagccgaatcaggcagcgggctatatggcgaagctgatttgggaatcggttagcgttaccgttgttgcagcggtggaggctatgaactggctgaaatctgcggcgaagctgttagctgcggaggtgaaggacaagaagacgggcgaaatcctgcgtaagcgctgcgcagtgcattgggttacgccggatggttttccggtatggcaggagtacaaaaagcctattcagacccgtctgaacctgatgtttctgggtcaatttcgtctgcagccgacgatcaacaccaataaggactccgagatcgacgcgcacaaacaggagtctggcatcgcacccaatttcgttcactcacaggacggttcccatctgcgtaagaccgtcgtgtgggcacacgagaagtatggcattgagtcgtttgcattgatccacgattcctttggtaccatcccggcggacgctgcgaacctgtttaaagcggttcgcgaaaccatggttgacacctatgaaagttgcgatgttctggcagacttttatgatcagttcgccgaccaactgcatgagtcccagctggataaaatgccggcgttaccggcgaagggcaacttaaatctccgcgacatcctggaatctgatttcgccttcgcgtaa

SEQ ID NO: 224 - DNA, 2652 bp, synthetic construct
  source 1..2652: mol_type = other DNA
atgaatacaattaacatagctaaaaatgatttcagcgatattgaactggctgcgatcccgtttaataccttggcggaccattatggtgagcgtctggcgcgtgagcaacttgctctggagcacgaatcctacgagatgggtgaagcgcgtttccggaagatgttcgagcgccagcttaaggctggcgaggtggcggataacgctgctgcgaagccgttgattacgaccctgctgccgaaaatgattgcgcgtattaacgattggttcgaggaagtgaaagcaaagcgtggtaaacgtccaaccgcattccagtttctgcaagagatcaagccggaggcggtggcatacattacgatcaaaaccactctcgcatgtctcaccagcgcggaaaatactacggtccaagcggtggccagcgcgattggccgcgcgattgaggacgaagcgcgttttggtcgcattcgtgacctggaagcgaaacattttaagaagaacgttgaagaacaattgaataaaggtgtgggccacgttcccaagaaagcgttcatgcaagtcgttgaagctgatatgctgagcaaaggcctgttaggtggtgaagcatggagcagctggcataaggaggactcaattcacgtcggcgtgcggtgcattgaaatgctgatcgaatcgaccggtatggttagcctgcatcgccaaaacgccggcgtggtgggtcaagatagcgaaacgattgaactggcgccagagtacgcggaagctatcgctaccagagccggcgcattggcggggatcagcccgatgttccagccgtgtgttgtaccaccgaagccgtggaccggtatcaccggtggaggttactgggcgaatggtagacgtccgttggcgttggttcgtacccatagcaaaaaggctctgatgcgttatgaagacgtttacatgccggaagtgtacaaagccatcaacatcgcgcagaacactgcgtggaaaatcaacaaaaaggtgttagctgtggcgaacgtaattacaaaatggaagcactgcccggttgaggacatcccggctattgaacgtgaagagctgccaatgaaaccagaggacattgacatgaatccggaggcgctgaccgcatggaaacgtgcggcagcagcggtctatcgttacgataaagccagaaagagccgtcgtatctccctggaattcatgcttgagcaggcgaacaaattcgctaaccacaaagccatctggtttccgtataatatggattggcgtggtcgtgtttacgcggtatcgatgttcaacccgcagggtaatgacatgaccaagggtttgttgaccttggccaaaggtaaaccgattggcaaagaaggttactattggttgaagatccacggtgcgaactgcgcaggggtggataaggtaccgttcccggaacgtattaaattcatcgaggaaaaccacgaaaacattatggcgtgcgcaaagagcccgctggaaaacacgtggtgggcagagcaggacagtccattctgcttcttggcgttctgtttcgaatatgcaggtgtccagcaccacggcctgagctataactgcagcctgccgctggcctttgatggttcttgtagcggtattcaacactttagcgccatgctgcgcgatgaggttggtggcagagcagtgaatctgctgccaagcgaaaccgtgcaagatatctatggcattgtggctaagaaggttaatgaaatcctgcaagcagacgcgattaacggcacggacaacgaggttgtcaccgtgaccgatgaaaacaccggtgagatctcggagaaagtgaaactgggcaccaaagccttggctggccaatggctggcatacggcgttactcgctccgtgaccaagcgttcggtgatgacccttgcttacggcagcaaagagtttggtttccgccaacaggttctggaggatactatccaaccggccatcgactctggtaaaggcctgatgttcacgcagccgaatcaggcagcgggctatatggcgaagctgatttgggaatcggttagcgttaccgttgttgcagcggtggaggctatgaactggctgaaatctgcggcgaagctgttagctgcggaggtgaaggacaagaagacgggcgaaatcctgcgtaagcgctgcgcagtgcattgggttacgccggatggttttccggtatggcaggagtacaaaaagcctattcagacccgtctgaacctgatgtttctgggtcaatttcgtctgcagccgacgatcaacaccaataaggactccgagatcgacgcgcacaaacaggagtctggcatcgcacccaatttcgttcactcacaggacggttcccatctgcgtaagaccgtcgtgtgggcacacgagaagtatggcattgagtcgtttgcattgatccacgattcctttggtaccatcccggcggacgctgcgaacctgtttaaagcggttcgcgaaaccatggttgacacctatgaaagttgcgatgttctggcagacttttatgatcagttcgccgaccaactgcatgagtcccagctggataaaatgccggcgttaccggcgaagggcaacttaaatctccgcgacatcctggaatctgatttcgccttcgcgtaa

SEQ ID NO: 225 - DNA, 2646 bp, synthetic construct
  source 1..2646: mol_type = other DNA
atgaatacaattaacatagctaaaaatgatttcagcgatattgaactggctgcgatcccgtttaataccttggcggaccattatggtgagcgtctggcgcgtgagcaacttgctctggagcacgaatcctacgagatgggtgaagcgcgtttccggaagatgttcgagcgccagcttaaggctggcgaggtggcggataacgctgctgcgaagccgttgattacgaccctgctgccgaaaatgattgcgcgtattaacgattggttcgaggaagtgaaagcaaagcgtggtaaacgtccaaccgcattccagtttctgcaagagatcaagccggaggcggtggcatacattacgatcaaaaccactctcgcatgtctcaccagcgcggataatactacggtccaagcggtggccagcgcgattggccgcgcgattgaggacgaagcgcgttttggtcgcattcgtgacctggaagcgaaacattttaagaagaacgttgaagaacaattgaatgtgggccacgtttacaagaaagcgttcatgcaagtcgttgaagctgatatgctgagcaaaggcctgttaggtggtgaagcatggagcagctggcataaggaggactcaattcacgtcggcgtgcggtgcattgaaatgctgatcgaatcgaccggtatggttagcctgcatcgccaaaacgccggcgtggtgggtcaagatagcgaaacgattgaactggcgccagagtacgcggaagctatcgctaccagagccggcgcattggcggggatcagcccgatgttccagccgtgtgttgtaccaccgaagccgtggaccggtatcaccggtggaggttactgggcgaatggtagacgtccgttggcgttggttcgtacccatagcaaaaaggctctgatgcgttatgaagacgtttacatgccggaagtgtacaaagccatcaacatcgcgcagaacactgcgtggaaaatcaacaaaaaggtgttagctgtggcgaacgtaattacaaaatggaagcactgcccggttgaggacatcccggctattgaacgtgaagagctgccaatgaaaccagaggacattgacatgaatccggaggcgctgaccgcatggaaacgtgcggcagcagcggtctatcgtggggataaagccagaaagagccgtcgtatctccctggaattcatgcttgagcaggcgaacaaattcgctaaccacaaagccatctggtttccgtataatatggattggcgtggtcgtgtttacgcggtatcgatgttcaacccgcagggtaatgacatgaccaagggtttgttgaccttggccaaaggtaaaccgattggcaaagaaggttactattggttgaagatccacggtgcgaactgcgcaggggtggataaggtaccgttcccggaacgtattaaattcatcgaggaaaaccacgaaaacattatggcgtgcgcaaagagcccgctggaaaacacgtggtgggcagagcaggacagtccattctgcttcttggcgttctgtttcgaatatgcaggtgtccagcaccacggcctgagctataactgcagcctgccgctggcctttgatggttcttgtagcggtattcaacactttagcgccatgctgcgcgatgaggttggtggcagagcagtgaatctgctgccaagcgaaaccgtgcaagatatctatggcattgtggctaagaaggttaatgaaatcctgcaagcagacgcgattaacggcacggacaacgaggttgtcaccgtgaccgatgaaaacaccggtgagatctcggagaaagtgaaactgggcaccaaagccttggctggccaatggctggcatacggcgttactcgctccgtgaccaagcgttcggtgatgacccttgcttacggcagcaaagagtttggtttccgccaacaggttctggaggatactatccaaccggccatcgactctggtaaaggcctgatgttcacgcagccgaatcaggcagcgggctatatggcgaagctgatttgggaatcggttagcgttaccgttgttgcagcggtggaggctatgaactggctgaaatctgcggcgaagctgttagctgcggaggtgaaggacaagaagacgggcgaaatcctgcgtaagcgctgcgcagtgcattgggttacgccggatggttttccggtatggcaggagtacaaaaagcctattcagacccgtctgaacctgatgtttctgggtcaatttcgtctgcagccgacgatcaacaccaataaggactccgagatcgacgcgcacaaacaggagtctggcatcgcacccaatttcgttcactcacaggacggttcccatctgcgtaagaccgtcgtgtgggcacacgagaagtatggcattgagtcgtttgcattgatccacgattcctttggtaccatcccggcggacgctgcgaacctgtttaaagcggttcgcgaaaccatggttgacacctatgaaagttgcgatgttctggcagacttttatgatcagttcgccgaccaactgcatgagtcccagctggataaaatgccggcgttaccggcgaagggcaacttaaatctccgcgacatcctggaatctgatttcgccttcgcgtaa

SEQ ID NO: 226 - DNA, 2646 bp, synthetic construct
  source 1..2646: mol_type = other DNA
atgaatacaattaacatagctaaaaatgatttcagcgatattgaactggctgcgatcccgtttaataccttggcggaccattatggtgagcgtctggcgcgtgagcaacttgctctggagcacgaatcctacgagatgggtgaagcgcgtttccggaagatgttcgagcgccagcttaaggctggcgaggtggcggataacgctgctgcgaagccgttgattacgaccctgctgccgaaaatgattgcgcgtattaacgattggttcgaggaagtgaaagcaaagcgtggtaaacgtccaaccgcattccagtttctgcaagagatcaagccggaggcggtggcatacattacgatcaaaaccactctcgcatgtctcaccagcgcggataatactacggtccaagcggtggccagcgcgattggccgcgcgattgaggacgaagcgcgttttggtcgcattcgtgacctggaagcgaaacattttaagaagaacgttgaagaacaattgaatgtgggccacgtttacaagaaagcgttcatgcaagtcgttgaagctgatatgctgagcaaaggcctgttaggtggtgaagcatggagcagctggcataaggaggactcaattcacgtcggcgtgcggtgcattgaaatgctgatcgaatcgaccggtatggttagcctgcatcgccaaaacgccggcgtggtgggtcaagatagcgaaacgattgaactggcgccagagtacgcggaagctatcgctaccagagccggcgcattggcggggatcagcccgatgttccagccgtgtgttgtaccaccgaagccgtggaccggtatcaccggtggaggttactgggcgaatggtagacgtccgttggcgttggttcgtacccatagcaaaaaggctctgatgcgttatgaagacgtttacatgccggaagtgtacaaagccatcaacatcgcgcagaacactgcgtggaaaatcaacaaaaaggtgttagctgtggcgaacgtaattacaaaatggaagcactgcccggttgaggacatcccggctattgaacgtgaagagctgccaatgaaaccagaggacattgacatgaatccggaggcgctgaccgcatggaaacgtgcggcagcagcggtctatcgttacgataaagccagaaagagccgtcgtatctccctggaattcatgcttgagcaggcgaacaaattcgctaaccacaaagccatctggtttccgtataatatggattggcgtggtcgtgtttacgcggtatcgatgttcaacccgcagggtaatgacatgaccaagggtttgttgaccttggccaaaggtaaaccgattggcaaagaaggttactattggttgaagatccacggtgcgaactgcgcaggggtggataaggtaccgttcccggaacgtattaaattcatcgaggaaaaccacgaaaacattatggcgtgcgcaaagagcccgctggaaaacacgtggtgggcagagcaggacagtccattctgcttcttggcgttctgtttcgaatatgcaggtgtccagcaccacggcctgagctataactgcagcctgccgctggcctttgatggttcttgtagcggtattcaacactttagcgccatgctgcgcgatgaggttggtggcagagcagtgaatctgctgccaagcgaaaccgtgcaagatatctatggcattgtggctaagaaggttaatgaaatcctgcaagcagacgcgattaacggcacggacaacgaggttgtcaccgtgaccgatgaaaacaccggtgagatctcggagaaagtgaaactgggcaccaaagccttggctggccaatggctggcatacggcgttactcgctccgtgaccaagcgttcggtgatgacccttgcttacggcagcaaagagtttggtttccgccaacaggttctggaggatactatccaaccggccatcgactctggtaaaggcctgatgttcacgcagccgaatcaggcagcgggctatatggcgaagctgatttgggaatcggttagcgttaccgttgttgcagcggtggaggctatgaactggctgaaatctgcggcgaagctgttagctgcggaggtgaaggacaagaagacgggcgaaatcctgcgtaagcgctgcgcagtgcattgggttacgccggatggttttccggtatggcaggagtacaaaaagcctattcagacccgtctgaacctgatgtttctgggtcaatttcgtctgcagccgacgatcaacaccaataaggactccgagatcgacgcgcacaaacaggagtctggcatcgcacccaatttcgttcactcacaggacggttcccatctgcgtaagaccgtcgtgtgggcacacgagaagtatggcattgagtcgtttgcattgatccacgattcctttggtaccatcccggcggacgctgcgaacctgtttaaagcggttcgcgaaaccatggttgacacctatgaaagttgcgatgttctggcagacttttatgatcagttcgccgaccaactgcatgagtcccagctggataaaatgccggcgttaccggcgaagggcaacttaaatctccgcgacatcctggaatctgatttcgccttcgcgtaa

SEQ ID NO: 227 - DNA, 2649 bp, synthetic construct
  source 1..2649: mol_type = other DNA
atgaatacaattaacatagctaaaaatgatttcagcgatattgaactggctgcgatcccgtttaataccttggcggaccattatggtgagcgtctggcgcgtgagcaacttgctctggagcacgaatcctacgagatgggtgaagcgcgtttccggaagatgttcgagcgccagcttaaggctggcgaggtggcggataacgctgctgcgaagccgttgattacgaccctgctgccgaaaatgattgcgcgtattaacgattggttcgaggaagtgaaagcaaagcgtggtaaacgtccaaccgcattccagtttctgcaagagatcaagccggaggcggtggcatacattacgatcaaaaccactctcgcatgtctcaccagcgcggataatactacggtccaagcggtggccagcgcgattggccgcgcgattgaggacgaagcgcgttttggtcgcattcgtgacctggaagcgaaacattttaagaagaacgttgaagaacaattgaatgctgtgggccacgtttacaagaaagcgttcatgcaagtcgttgaagctgatatgctgagcaaaggcctgttaggtggtgaagcatggagcagctggcataaggaggactcaattcacgtcggcgtgcggtgcattgaaatgctgatcgaatcgaccggtatggttagcctgcatcgccaaaacgccggcgtggtgggtcaagatagcgaaacgattgaactggcgccagagtacgcggaagctatcgctaccagagccggcgcattggcggggatcagcccgatgttccagccgtgtgttgtaccaccgaagccgtggaccggtatcaccggtggaggttactgggcgaatggtagacgtccgttggcgttggttcgtacccatagcaaaaaggctctgatgcgttatgaagacgtttacatgccggaagtgtacaaagccatcaacatcgcgcagaacactgcgtggaaaatcaacaaaaaggtgttagctgtggcgaacgtaattacaaaatggaagcactgcccggttgaggacatcccggctattgaacgtgaagagctgccaatgaaaccagaggacattgacatgaatccggaggcgctgaccgcatggaaacgtgcggcagcagcggtctatcgtagtgataaagccagaaagagccgtcgtatctccctggaattcatgcttgagcaggcgaacaaattcgctaaccacaaagccatctggtttccgtataatatggattggcgtggtcgtgtttacgcggtatcgatgttcaacccgcagggtaatgacatgaccaagggtttgttgaccttggccaaaggtaaaccgattggcaaagaaggttactattggttgaagatccacggtgcgaactgcgcaggggtggataaggtaccgttcccggaacgtattaaattcatcgaggaaaaccacgaaaacattatggcgtgcgcaaagagcccgctggaaaacacgtggtgggcagagcaggacagtccattctgcttcttggcgttctgtttcgaatatgcaggtgtccagcaccacggcctgagctataactgcagcctgccgctggcctttgatggttcttgtagcggtattcaacactttagcgccatgctgcgcgatgaggttggtggcagagcagtgaatctgctgccaagcgaaaccgtgcaagatatctatggcattgtggctaagaaggttaatgaaatcctgcaagcagacgcgattaacggcacggacaacgaggttgtcaccgtgaccgatgaaaacaccggtgagatctcggagaaagtgaaactgggcaccaaagccttggctggccaatggctggcatacggcgttactcgctccgtgaccaagcgttcggtgatgacccttgcttacggcagcaaagagtttggtttccgccaacaggttctggaggatactatccaaccggccatcgactctggtaaaggcctgatgttcacgcagccgaatcaggcagcgggctatatggcgaagctgatttgggaatcggttagcgttaccgttgttgcagcggtggaggctatgaactggctgaaatctgcggcgaagctgttagctgcggaggtgaaggacaagaagacgggcgaaatcctgcgtaagcgctgcgcagtgcattgggttacgccggatggttttccggtatggcaggagtacaaaaagcctattcagacccgtctgaacctgatgtttctgggtcaatttcgtctgcagccgacgatcaacaccaataaggactccgagatcgacgcgcacaaacaggagtctggcatcgcacccaatttcgttcactcacaggacggttcccatctgcgtaagaccgtcgtgtgggcacacgagaagtatggcattgagtcgtttgcattgatccacgattcctttggtaccatcccggcggacgctgcgaacctgtttaaagcggttcgcgaaaccatggttgacacctatgaaagttgcgatgttctggcagacttttatgatcagttcgccgaccaactgcatgagtcccagctggataaaatgccggcgttaccggcgaagggcaacttaaatctccgcgacatcctggaatctgatttcgccttcgcgtaa

SEQ ID NO: 228 - DNA, 2649 bp, synthetic construct
  source 1..2649: mol_type = other DNA
atgaatacaattaacatagctaaaaatgatttcagcgatattgaactggctgcgatcccgtttaataccttggcggaccattatggtgagcgtctggcgcgtgagcaacttgctctggagcacgaatcctacgagatgggtgaagcgcgtttccggaagatgttcgagcgccagcttaaggctggcgaggtggcggataacgctgctgcgaagccgttgattacgaccctgctgccgaaaatgattgcgcgtattaacgattggttcgaggaagtgaaagcaaagcgtggtaaacgtccaaccgcattccagtttctgcaagagatcaagccggaggcggtggcatacattacgatcaaaaccactctcgcatgtctcaccagcgcggataatactacggtccaagcggtggccagcgcgattggccgcgcgattgaggacgaagcgcgttttggtcgcattcgtgacctggaagcgaaacattttaagaagaacgttgaagaacaattgaatggtgtgggccacgtttacaagaaagcgttcatgcaagtcgttgaagctgatatgctgagcaaaggcctgttaggtggtgaagcatggagcagctggcataaggaggactcaattcacgtcggcgtgcggtgcattgaaatgctgatcgaatcgaccggtatggttagcctgcatcgccaaaacgccggcgtggtgggtcaagatagcgaaacgattgaactggcgccagagtacgcggaagctatcgctaccagagccggcgcattggcggggatcagcccgatgttccagccgtgtgttgtaccaccgaagccgtggaccggtatcaccggtggaggttactgggcgaatggtagacgtccgttggcgttggttcgtacccatagcaaaaaggctctgatgcgttatgaagacgtttacatgccggaagtgtacaaagccatcaacatcgcgcagaacactgcgtggaaaatcaacaaaaaggtgttagctgtggcgaacgtaattacaaaatggaagcactgcccggttgaggacatcccggctattgaacgtgaagagctgccaatgaaaccagaggacattgacatgaatccggaggcgctgaccgcatggaaacgtgcggcagcagcggtctatcgtagtgataaagccagaaagagccgtcgtatctccctggaattcatgcttgagcaggcgaacaaattcgctaaccacaaagccatctggtttccgtataatatggattggcgtggtcgtgtttacgcggtatcgatgttcaacccgcagggtaatgacatgaccaagggtttgttgaccttggccaaaggtaaaccgattggcaaagaaggttactattggttgaagatccacggtgcgaactgcgcaggggtggataaggtaccgttcccggaacgtattaaattcatcgaggaaaaccacgaaaacattatggcgtgcgcaaagagcccgctggaaaacacgtggtgggcagagcaggacagtccattctgcttcttggcgttctgtttcgaatatgcaggtgtccagcaccacggcctgagctataactgcagcctgccgctggcctttgatggttcttgtagcggtattcaacactttagcgccatgctgcgcgatgaggttggtggcagagcagtgaatctgctgccaagcgaaaccgtgcaagatatctatggcattgtggctaagaaggttaatgaaatcctgcaagcagacgcgattaacggcacggacaacgaggttgtcaccgtgaccgatgaaaacaccggtgagatctcggagaaagtgaaactgggcaccaaagccttggctggccaatggctggcatacggcgttactcgctccgtgaccaagcgttcggtgatgacccttgcttacggcagcaaagagtttggtttccgccaacaggttctggaggatactatccaaccggccatcgactctggtaaaggcctgatgttcacgcagccgaatcaggcagcgggctatatggcgaagctgatttgggaatcggttagcgttaccgttgttgcagcggtggaggctatgaactggctgaaatctgcggcgaagctgttagctgcggaggtgaaggacaagaagacgggcgaaatcctgcgtaagcgctgcgcagtgcattgggttacgccggatggttttccggtatggcaggagtacaaaaagcctattcagacccgtctgaacctgatgtttctgggtcaatttcgtctgcagccgacgatcaacaccaataaggactccgagatcgacgcgcacaaacaggagtctggcatcgcacccaatttcgttcactcacaggacggttcccatctgcgtaagaccgtcgtgtgggcacacgagaagtatggcattgagtcgtttgcattgatccacgattcctttggtaccatcccggcggacgctgcgaacctgtttaaagcggttcgcgaaaccatggttgacacctatgaaagttgcgatgttctggcagacttttatgatcagttcgccgaccaactgcatgagtcccagctggataaaatgccggcgttaccggcgaagggcaacttaaatctccgcgacatcctggaatctgatttcgccttcgcgtaa

SEQ ID NO: 229 - DNA, 2649 bp, synthetic construct
  source 1..2649: mol_type = other DNA
atgaatacaattaacatagctaaaaatgatttcagcgatattgaactggctgcgatcccgtttaataccttggcggaccattatggtgagcgtctggcgcgtgagcaacttgctctggagcacgaatcctacgagatgggtgaagcgcgtttccggaagatgttcgagcgccagcttaaggctggcgaggtggcggataacgctgctgcgaagccgttgattacgaccctgctgccgaaaatgattgcgcgtattaacgattggttcgaggaagtgaaagcaaagcgtggtaaacgtccaaccgcattccagtttctgcaagagatcaagccggaggcggtggcatacattacgatcaaaaccactctcgcatgtctcaccagcgcggataatactacggtccaagcggtggccagcgcgattggccgcgcgattgaggacgaagcgcgttttggtcgcattcgtgacctggaagcgaaacattttaagaagaacgttgaagaacaattgaatgcagtgggccacgtttacaagaaagcgttcatgcaagtcgttgaagctgatatgctgagcaaaggcctgttaggtggtgaagcatggagcagctggcataaggaggactcaattcacgtcggcgtgcggtgcattgaaatgctgatcgaatcgaccggtatggttagcctgcatcgccaaaacgccggcgtggtgggtcaagatagcgaaacgattgaactggcgccagagtacgcggaagctatcgctaccagagccggcgcattggcggggatcagcccgatgttccagccgtgtgttgtaccaccgaagccgtggaccggtatcaccggtggaggttactgggcgaatggtagacgtccgttggcgttggttcgtacccatagcaaaaaggctctgatgcgttatgaagacgtttacatgccggaagtgtacaaagccatcaacatcgcgcagaacactgcgtggaaaatcaacaaaaaggtgttagctgtggcgaacgtaattacaaaatggaagcactgcccggttgaggacatcccggctattgaacgtgaagagctgccaatgaaaccagaggacattgacatgaatccggaggcgctgaccgcatggaaacgtgcggcagcagcggtctatcgtaaggataaagccagaaagagccgtcgtatctccctggaattcatgcttgagcaggcgaacaaattcgctaaccacaaagccatctggtttccgtataatatggattggcgtggtcgtgtttacgcggtatcgatgttcaacccgcagggtaatgacatgaccaagggtttgttgaccttggccaaaggtaaaccgattggcaaagaaggttactattggttgaagatccacggtgcgaactgcgcaggggtggataaggtaccgttcccggaacgtattaaattcatcgaggaaaaccacgaaaacattatggcgtgcgcaaagagcccgctggaaaacacgtggtgggcagagcaggacagtccattctgcttcttggcgttctgtttcgaatatgcaggtgtccagcaccacggcctgagctataactgcagcctgccgctggcctttgatggttcttgtagcggtattcaacactttagcgccatgctgcgcgatgaggttggtggcagagcagtgaatctgctgccaagcgaaaccgtgcaagatatctatggcattgtggctaagaaggttaatgaaatcctgcaagcagacgcgattaacggcacggacaacgaggttgtcaccgtgaccgatgaaaacaccggtgagatctcggagaaagtgaaactgggcaccaaagccttggctggccaatggctggcatacggcgttactcgctccgtgaccaagcgttcggtgatgacccttgcttacggcagcaaagagtttggtttccgccaacaggttctggaggatactatccaaccggccatcgactctggtaaaggcctgatgttcacgcagccgaatcaggcagcgggctatatggcgaagctgatttgggaatcggttagcgttaccgttgttgcagcggtggaggctatgaactggctgaaatctgcggcgaagctgttagctgcggaggtgaaggacaagaagacgggcgaaatcctgcgtaagcgctgcgcagtgcattgggttacgccggatggttttccggtatggcaggagtacaaaaagcctattcagacccgtctgaacctgatgtttctgggtcaatttcgtctgcagccgacgatcaacaccaataaggactccgagatcgacgcgcacaaacaggagtctggcatcgcacccaatttcgttcactcacaggacggttcccatctgcgtaagaccgtcgtgtgggcacacgagaagtatggcattgagtcgtttgcattgatccacgattcctttggtaccatcccggcggacgctgcgaacctgtttaaagcggttcgcgaaaccatggttgacacctatgaaagttgcgatgttctggcagacttttatgatcagttcgccgaccaactgcatgagtcccagctggataaaatgccggcgttaccggcgaagggcaacttaaatctccgcgacatcctggaatctgatttcgccttcgcgtaa

SEQ ID NO: 230 - DNA, 2649 bp, synthetic construct; identical to SEQ ID NO: 184
  source 1..2649: mol_type = other DNA

SEQ ID NO: 231 - DNA, 2649 bp, synthetic construct
  source 1..2649: mol_type = other DNA
atgaatacaattaacatagctaaaaatgatttcagcgatattgaactggctgcgatcccgtttaataccttggcggaccattatggtgagcgtctggcgcgtgagcaacttgctctggagcacgaatcctacgagatgggtgaagcgcgtttccggaagatgttcgagcgccagcttaaggctggcgaggtggcggataacgctgctgcgaagccgttgattacgaccctgctgccgaaaatgattgcgcgtattaacgattggttcgaggaagtgaaagcaaagcgtggtaaacgtccaaccgcattccagtttctgcaagagatcaagccggaggcggtggcatacattacgatcaaaaccactctcgcatgtctcaccagcgcggataatactacggtccaagcggtggccagcgcgattggccgcgcgattgaggacgaagcgcgttttggtcgcattcgtgacctggaagcgaaacattttaagaagaacgttgaagaacaattgaatcgcgtgggccacgtttacaagaaagcgttcatgcaagtcgttgaagctgatatgctgagcaaaggcctgttaggtggtgaagcatggagcagctggcataaggaggactcaattcacgtcggcgtgcggtgcattgaaatgctgatcgaatcgaccggtatggttagcctgcatcgccaaaacgccggcgtggtgggtcaagatagcgaaacgattgaactggcgccagagtacgcggaagctatcgctaccagagccggcgcattggcggggatcagcccgatgttccagccgtgtgttgtaccaccgaagccgtggaccggtatcaccggtggaggttactgggcgaatggtagacgtccgttggcgttggttgctacccatagcaaaaaggctctgatgcgttatgaagacgtttacatgccggaagtgtacaaagccatcaacatcgcgcagaacactgcgtggaaaatcaacaaaaaggtgttagctgtggcgaacgtaattacaaaatggaagcactgcccggttgaggacatcccggctattgaacgtgaagagctgccaatgaaaccagaggacattgacatgaatccggaggcgctgaccgcatggaaacgtgcggcagcagcggtctatcgtaaggataaagccagaaagagccgtcgtatctccctggaattcatgcttgagcaggcgaacaaattcgctaaccacaaagccatctggtttccgtataatatggattggcgtggtcgtgtttacgcggtatcgatgttcaacccgcagggtaatgacatgaccaagggtttgttgaccttggccaaaggtaaaccgattggcaaagaaggttactattggttgaagatccacggtgcgaactgcgcaggggtggataaggtaccgttcccggaacgtattaaattcatcgaggaaaaccacgaaaacattatggcgtgcgcaaagagcccgctggaaaacacgtggtgggcagagcaggacagtccattctgcttcttggcgttctgtttcgaatatgcaggtgtccagcaccacggcctgagctataactgcagcctgccgctggcctttgatggttcttgtagcggtattcaacactttagcgccatgctgcgcgatgaggttggtggcagagcagtgaatctgctgccaagcgaaaccgtgcaagatatctatggcattgtggctaagaaggttaatgaaatcctgcaagcagacgcgattaacggcacggacaacgaggttgtcaccgtgaccgatgaaaacaccggtgagatctcggagaaagtgaaactgggcaccaaagccttggctggccaatggctggcatacggcgttactcgctccgtgaccaagcgttcggtgatgacccttgcttacggcagcaaagagtttggtttccgccaacaggttctggaggatactatccaaccggccatcgactctggtaaaggcctgatgttcacgcagccgaatcaggcagcgggctatatggcgaagctgatttgggaatcggttagcgttaccgttgttgcagcggtggaggctatgaactggctgaaatctgcggcgaagctgttagctgcggaggtgaaggacaagaagacgggcgaaatcctgcgtaagcgctgcgcagtgcattgggttacgccggatggttttccggtatggcaggagtacaaaaagcctattcagacccgtctgaacctgatgtttctgggtcaatttcgtctgcagccgacgatcaacaccaataaggactccgagatcgacgcgcacaaacaggagtctggcatcgcacccaatttcgttcactcacaggacggttcccatctgcgtaagaccgtcgtgtgggcacacgagaagtatggcattgagtcgtttgcattgatccacgattcctttggtaccatcccggcggacgctgcgaacctgtttaaagcggttcgcgaaaccatggttgacacctatgaaagttgcgatgttctggcagacttttatgatcagttcgccgaccaactgcatgagtcccagctggataaaatgccggcgttaccggcgaagggcaacttaaatctccgcgacatcctggaatctgatttcgccttcgcgtaa

SEQ ID NO: 232 - DNA, 2649 bp, synthetic construct
  source 1..2649: mol_type = other DNA
atgaatacaattaacatagctaaaaatgatttcagcgatattgaactggctgcgatcccgtttaataccttggcggaccattatggtgagcgtctggcgcgtgagcaacttgctctggagcacgaatcctacgagatgggtgaagcgcgtttccggaagatgttcgagcgccagcttaaggctggcgaggtggcggataacgctgctgcgaagccgttgattacgaccctgctgccgaaaatgattgcgcgtattaacgattggttcgaggaagtgaaagcaaagcgtggtaaacgtccaaccgcattccagtttctgcaagagatcaagccggaggcggtggcatacattacgatcaaaaccactctcgcatgtctcaccagcgcggataatactacggtccaagcggtggccagcgcgattggccgcgcgattgaggacgaagcgcgttttggtcgcattcgtgacctggaagcgaaacattttaagaagaacgttgaagaacaattgaataaagtgggccacgtttacaagaaagcgttcatgcaagtcgttgaagctgatatgctgagcaaaggcctgttaggtggtgaagcatggagcagctggcataaggaggactcaattcacgtcggcgtgcggtgcattgaaatgctgatcgaatcgaccggtatggttagcctgcatcgccaaaacgccggcgtggtgggtcaagatagcgaaacgattgaactggcgccagagtacgcggaagctatcgctaccagagccggcgcattggcggggatcagcccgatgttccagccgtgtgttgtaccaccgaagccgtggaccggtatcaccggtggaggttactgggcgaatggtagacgtccgttggcgttggttgctacccatagcaaaaaggctctgatgcgttatgaagacgtttacatgccggaagtgtacaaagccatcaacatcgcgcagaacactgcgtggaaaatcaacaaaaaggtgttagctgtggcgaacgtaattacaaaatggaagcactgcccggttgaggacatcccggctattgaacgtgaagagctgccaatgaaaccagaggacattgacatgaatccggaggcgctgaccgcatggaaacgtgcggcagcagcggtctatcgtaaggataaagccagaaagagccgtcgtatctccctggaattcatgcttgagcaggcgaacaaattcgctaaccacaaagccatctggtttccgtataatatggattggcgtggtcgtgtttacgcggtatcgatgttcaacccgcagggtaatgacatgaccaagggtttgttgaccttggccaaaggtaaaccgattggcaaagaaggttactattggttgaagatccacggtgcgaactgcgcaggggtggataaggtaccgttcccggaacgtattaaattcatcgaggaaaaccacgaaaacattatggcgtgcgcaaagagcccgctggaaaacacgtggtgggcagagcaggacagtccattctgcttcttggcgttctgtttcgaatatgcaggtgtccagcaccacggcctgagctataactgcagcctgccgctggcctttgatggttcttgtagcggtattcaacactttagcgccatgctgcgcgatgaggttggtggcagagcagtgaatctgctgccaagcgaaaccgtgcaagatatctatggcattgtggctaagaaggttaatgaaatcctgcaagcagacgcgattaacggcacggacaacgaggttgtcaccgtgaccgatgaaaacaccggtgagatctcggagaaagtgaaactgggcaccaaagccttggctggccaatggctggcatacggcgttactcgctccgtgaccaagcgttcggtgatgacccttgcttacggcagcaaagagtttggtttccgccaacaggttctggaggatactatccaaccggccatcgactctggtaaaggcctgatgttcacgcagccgaatcaggcagcgggctatatggcgaagctgatttgggaatcggttagcgttaccgttgttgcagcggtggaggctatgaactggctgaaatctgcggcgaagctgttagctgcggaggtgaaggacaagaagacgggcgaaatcctgcgtaagcgctgcgcagtgcattgggttacgccggatggttttccggtatggcaggagtacaaaaagcctattcagacccgtctgaacctgatgtttctgggtcaatttcgtctgcagccgacgatcaacaccaataaggactccgagatcgacgcgcacaaacaggagtctggcatcgcacccaatttcgttcactcacaggacggttcccatctgcgtaagaccgtcgtgtgggcacacgagaagtatggcattgagtcgtttgcattgatccacgattcctttggtaccatcccggcggacgctgcgaacctgtttaaagcggttcgcgaaaccatggttgacacctatgaaagttgcgatgttctggcagacttttatgatcagttcgccgaccaactgcatgagtcccagctggataaaatgccggcgttaccggcgaagggcaacttaaatctccgcgacatcctggaatctgatttcgccttcgcgtaa

SEQ ID NO: 233 - DNA, 2652 bp, synthetic construct
  source 1..2652: mol_type = other DNA
atgaatacaattaacatagctaaaaatgatttcagcgatattgaactggctgcgatcccgtttaataccttggcggaccattatggtgagcgtctggcgcgtgagcaacttgctctggagcacgaatcctacgagatgggtgaagcgcgtttccggaagatgttcgagcgccagcttaaggctggcgaggtggcggataacgctgctgcgaagccgttgattacgaccctgctgccgaaaatgattgcgcgtattaacgattggttcgaggaagtgaaagcaaagcgtggtaaacgtccaaccgcattccagtttctgcaagagatcaagccggaggcggtggcatacattacgatcaaaaccactctcgcatgtctcaccagcgcggataatactacggtccaagcggtggccagcgcgattggccgcgcgattgaggacgaagcgcgttttggtcgcattcgtgacctggaagcgaaacattttaagaagaacgttgaagaacaattgaataaacgcgtgggccacgtttacaagaaagcgttcatgcaagtcgttgaagctgatatgctgagcaaaggcctgttaggtggtgaagcatggagcagctggcataaggaggactcaattcacgtcggcgtgcggtgcattgaaatgctgatcgaatcgaccggtatggttagcctgcatcgccaaaacgccggcgtggtgggtcaagatagcgaaacgattgaactggcgccagagtacgcggaagctatcgctaccagagccggcgcattggcggggatcagcccgatgttccagccgtgtgttgtaccaccgaagccgtggaccggtatcaccggtggaggttactgggcgaatggtagacgtccgttggcgttggttgctacccatagcaaaaaggctctgatgcgttatgaagacgtttacatgccggaagtgtacaaagccatcaacatcgcgcagaacactgcgtggaaaatcaacaaaaaggtgttagctgtggcgaacgtaattacaaaatggaagcactgcccggttgaggacatcccggctattgaacgtgaagagctgccaatgaaaccagaggacattgacatgaatccggaggcgctgaccgcatggaaacgtgcggcagcagcggtctatcgtagtgataaagccagaaagagccgtcgtatctccctggaattcatgcttgagcaggcgaacaaattcgctaaccacaaagccatctggtttccgtataatatggattggcgtggtcgtgtttacgcggtatcgatgttcaacccgcagggtaatgacatgaccaagggtttgttgaccttggccaaaggtaaaccgattggcaaagaaggttactattggttgaagatccacggtgcgaactgcgcaggggtggataaggtaccgttcccggaacgtattaaattcatcgaggaaaaccacgaaaacattatggcgtgcgcaaagagcccgctggaaaacacgtggtgggcagagcaggacagtccattctgcttcttggcgttctgtttcgaatatgcaggtgtccagcaccacggcctgagctataactgcagcctgccgctggcctttgatggttcttgtagcggtattcaacactttagcgccatgctgcgcgatgaggttggtggcagagcagtgaatctgctgccaagcgaaaccgtgcaagatatctatggcattgtggctaagaaggttaatgaaatcctgcaagcagacgcgattaacggcacggacaacgaggttgtcaccgtgaccgatgaaaacaccggtgagatctcggagaaagtgaaactgggcaccaaagccttggctggccaatggctggcatacggcgttactcgctccgtgaccaagcgttcggtgatgacccttgcttacggcagcaaagagtttggtttccgccaacaggttctggaggatactatccaaccggccatcgactctggtaaaggcctgatgttcacgcagccgaatcaggcagcgggctatatggcgaagctgatttgggaatcggttagcgttaccgttgttgcagcggtggaggctatgaactggctgaaatctgcggcgaagctgttagctgcggaggtgaaggacaagaagacgggcgaaatcctgcgtaagcgctgcgcagtgcattgggttacgccggatggttttccggtatggcaggagtacaaaaagcctattcagacccgtctgaacctgatgtttctgggtcaatttcgtctgcagccgacgatcaacaccaataaggactccgagatcgacgcgcacaaacaggagtctggcatcgcacccaatttcgttcactcacaggacggttcccatctgcgtaagaccgtcgtgtgggcacacgagaagtatggcattgagtcgtttgcattgatccacgattcctttggtaccatcccggcggacgctgcgaacctgtttaaagcggttcgcgaaaccatggttgacacctatgaaagttgcgatgttctggcagacttttatgatcagttcgccgaccaactgcatgagtcccagctggataaaatgccggcgttaccggcgaagggcaacttaaatctccgcgacatcctggaatctgatttcgccttcgcgtaa

SEQ ID NO: 234 - DNA, 2652 bp, synthetic construct
  source 1..2652: mol_type = other DNA
atgaatacaattaacatagctaaaaatgatttcagcgatattgaactggctgcgatcccgtttaataccttggcggaccattatggtgagcgtctggcgcgtgagcaacttgctctggagcacgaatcctacgagatgggtgaagcgcgtttccggaagatgttcgagcgccagcttaaggctggcgaggtggcggataacgctgctgcgaagccgttgattacgaccctgctgccgaaaatgattgcgcgtattaacgattggttcgaggaagtgaaagcaaagcgtggtaaacgtccaaccgcattccagtttctgcaagagatcaagccggaggcggtggcatacattacgatcaaaaccactctcgcatgtctcaccagcgcggataatactacggtccaagcggtggccagcgcgattggccgcgcgattgaggacgaagcgcgttttggtcgcattcgtgacctggaagcgaaacattttaagaagaacgttgaagaacaattgaataaacgcgtgggccacgtttacaagaaagcgttcatgcaagtcgttgaagctgatatgctgagcaaaggcctgttaggtggtgaagcatggagcagctggcataaggaggactcaattcacgtcggcgtgcggtgcattgaaatgctgatcgaatcgaccggtatggttagcctgcatcgccaaaacgccggcgtggtgggtcaagatagcgaaacgattgaactggcgccagagtacgcggaagctatcgctaccagagccggcgcattggcggggatcagcccgatgttccagccgtgtgttgtaccaccgaagccgtggaccggtatcaccggtggaggttactgggcgaatggtagacgtccgttggcgttggttgctacccatagcaaaaaggctctgatgcgttatgaagacgtttacatgccggaagtgtacaaagccatcaacatcgcgcagaacactgcgtggaaaatcaacaaaaaggtgttagctgtggcgaacgtaattacaaaatggaagcactgcccggttgaggacatcccggctattgaacgtgaagagctgccaatgaaaccagaggacattgacatgaatccggaggcgctgaccgcatggaaacgtgcggcagcagcggtctatcgttacgataaagccagaaagagccgtcgtatctccctggaattcatgcttgagcaggcgaacaaattcgctaaccacaaagccatctggtttccgtataatatggattggcgtggtcgtgtttacgcggtatcgatgttcaacccgcagggtaatgacatgaccaagggtttgttgaccttggccaaaggtaaaccgattggcaaagaaggttactattggttgaagatccacggtgcgaactgcgcaggggtggataaggtaccgttcccggaacgtattaaattcatcgaggaaaaccacgaaaacattatggcgtgcgcaaagagcccgctggaaaacacgtggtgggcagagcaggacagtccattctgcttcttggcgttctgtttcgaatatgcaggtgtccagcaccacggcctgagctataactgcagcctgccgctggcctttgatggttcttgtagcggtattcaacactttagcgccatgctgcgcgatgaggttggtggcagagcagtgaatctgctgccaagcgaaaccgtgcaagatatctatggcattgtggctaagaaggttaatgaaatcctgcaagcagacgcgattaacggcacggacaacgaggttgtcaccgtgaccgatgaaaacaccggtgagatctcggagaaagtgaaactgggcaccaaagccttggctggccaatggctggcatacggcgttactcgctccgtgaccaagcgttcggtgatgacccttgcttacggcagcaaagagtttggtttccgccaacaggttctggaggatactatccaaccggccatcgactctggtaaaggcctgatgttcacgcagccgaatcaggcagcgggctatatggcgaagctgatttgggaatcggttagcgttaccgttgttgcagcggtggaggctatgaactggctgaaatctgcggcgaagctgttagctgcggaggtgaaggacaagaagacgggcgaaatcctgcgtaagcgctgcgcagtgcattgggttacgccggatggttttccggtatggcaggagtacaaaaagcctattcagacccgtctgaacctgatgtttctgggtcaatttcgtctgcagccgacgatcaacaccaataaggactccgagatcgacgcgcacaaacaggagtctggcatcgcacccaatttcgttcactcacaggacggttcccatctgcgtaagaccgtcgtgtgggcacacgagaagtatggcattgagtcgtttgcattgatccacgattcctttggtaccatcccggcggacgctgcgaacctgtttaaagcggttcgcgaaaccatggttgacacctatgaaagttgcgatgttctggcagacttttatgatcagttcgccgaccaactgcatgagtcccagctggataaaatgccggcgttaccggcgaagggcaacttaaatctccgcgacatcctggaatctgatttcgccttcgcgtaa

SEQ ID NO: 235 - DNA, 2652 bp, synthetic construct
  source 1..2652: mol_type = other DNA
atgaatacaattaacatagctaaaaatgatttcagcgatattgaactggctgcgatcccgtttaataccttggcggaccattatggtgagcgtctggcgcgtgagcaacttgctctggagcacgaatcctacgagatgggtgaagcgcgtttccggaagatgttcgagcgccagcttaaggctggcgaggtggcggataacgctgctgcgaagccgttgattacgaccctgctgccgaaaatgattgcgcgtattaacgattggttcgaggaagtgaaagcaaagcgtggtaaacgtccaaccgcattccagtttctgcaagagatcaagccggaggcggtggcatacattacgatcaaaaccactctcgcatgtctcaccagcgcggataatactacggtccaagcggtggccagcgcgattggccgcgcgattgaggacgaagcgcgttttggtcgcattcgtgacctggaagcgaaacattttaagaagaacgttgaagaacaattgaataaacgcgtgggccacgtttacaagaaagcgttcatgcaagtcgttgaagctgatatgctgagcaaaggcctgttaggtggtgaagcatggagcagctggcataaggaggactcaattcacgtcggcgtgcggtgcattgaaatgctgatcgaatcgaccggtatggttagcctgcatcgccaaaacgccggcgtggtgggtcaagatagcgaaacgattgaactggcgccagagtacgcggaagctatcgctaccagagccggcgcattggcggggatcagcccgatgttccagccgtgtgttgtaccaccgaagccgtggaccggtatcaccggtggaggttactgggcgaatggtagacgtccgttggcgttggttgctacccatagcaaaaaggctctgatgcgttatgaagacgtttacatgccggaagtgtacaaagccatcaacatcgcgcagaacactgcgtggaaaatcaacaaaaaggtgttagctgtggcgaacgtaattacaaaatggaagcactgcccggttgaggacatcccggctattgaacgtgaagagctgccaatgaaaccagaggacattgacatgaatccggaggcgctgaccgcatggaaacgtgcggcagcagcggtcgcccgtaaggataaagccagaaagagccgtcgtatctccctggaattcatgcttgagcaggcgaacaaattcgctaaccacaaagccatctggtttccgtataatatggattggcgtggtcgtgtttacgcggtatcgatgttcaacccgcagggtaatgacatgaccaagggtttgttgaccttggccaaaggtaaaccgattggcaaagaaggttactattggttgaagatccacggtgcgaactgcgcaggggtggataaggtaccgttcccggaacgtattaaattcatcgaggaaaaccacgaaaacattatggcgtgcgcaaagagcccgctggaaaacacgtggtgggcagagcaggacagtccattctgcttcttggcgttctgtttcgaatatgcaggtgtccagcaccacggcctgagctataactgcagcctgccgctggcctttgatggttcttgtagcggtattcaacactttagcgccatgctgcgcgatgaggttggtggcagagcagtgaatctgctgccaagcgaaaccgtgcaagatatctatggcattgtggctaagaaggttaatgaaatcctgcaagcagacgcgattaacggcacggacaacgaggttgtcaccgtgaccgatgaaaacaccggtgagatctcggagaaagtgaaactgggcaccaaagccttggctggccaatggctggcatacggcgttactcgctccgtgaccaagcgttcggtgatgacccttgcttacggcagcaaagagtttggtttccgccaacaggttctggaggatactatccaaccggccatcgactctggtaaaggcctgatgttcacgcagccgaatcaggcagcgggctatatggcgaagctgatttgggaatcggttagcgttaccgttgttgcagcggtggaggctatgaactggctgaaatctgcggcgaagctgttagctgcggaggtgaaggacaagaagacgggcgaaatcctgcgtaagcgctgcgcagtgcattgggttacgccggatggttttccggtatggcaggagtacaaaaagcctattcagacccgtctgaacctgatgtttctgggtcaatttcgtctgcagccgacgatcaacaccaataaggactccgagatcgacgcgcacaaacaggagtctggcatcgcacccaatttcgttcactcacaggacggttcccatctgcgtaagaccgtcgtgtgggcacacgagaagtatggcattgagtcgtttgcattgatccacgattcctttggtaccatcccggcggacgctgcgaacctgtttaaagcggttcgcgaaaccatggttgacacctatgaaagttgcgatgttctggcagacttttatgatcagttcgccgaccaactgcatgagtcccagctggataaaatgccggcgttaccggcgaagggcaacttaaatctccgcgacatcctggaatctgatttcgccttcgcgtaa

SEQ ID NO: 236 - DNA, 2652 bp, synthetic construct
  source 1..2652: mol_type = other DNA
atgaatacaattaacatagctaaaaatgatttcagcgatattgaactggctgcgatcccgtttaataccttggcggaccattatggtgagcgtctggcgcgtgagcaacttgctctggagcacgaatcctacgagatgggtgaagcgcgtttccggaagatgttcgagcgccagcttaaggctggcgaggtggcggataacgctgctgcgaagccgttgattacgaccctgctgccgaaaatgattgcgcgtattaacgattggttcgaggaagtgaaagcaaagcgtggtaaacgtccaaccgcattccagtttctgcaagagatcaagccggaggcggtggcatacattacgatcaaaaccactctcgcatgtctcaccagcgcggataatactacggtccaagcggtggccagcgcgattggccgcgcgattgaggacgaagcgcgttttggtcgcattcgtgacctggaagcgaaacattttaagaagaacgttgaagaacaattgaataaacgcgtgggccacgtttacaagaaagcgttcatgcaagtcgttgaagctgatatgctgagcaaaggcctgttaggtggtgaagcatggagcagctggcataaggaggactcaattcacgtcggcgtgcggtgcattgaaatgctgatcgaatcgaccggtatggttagcctgcatcgccaaaacgccggcgtggtgggtcaagatagcgaaacgattgaactggcgccagagtacgcggaagctatcgctaccagagccggcgcattggcggggatcagcccgatgttccagccgtgtgttgtaccaccgaagccgtggaccggtatcaccggtggaggttactgggcgaatggtagacgtccgttggcgttggttgctacccatagcaaaaaggctctgatgcgttatgaagacgtttacatgccggaagtgtacaaagccatcaacatcgcgcagaacactgcgtggaaaatcaacaaaaaggtgttagctgtggcgaacgtaattacaaaatggaagcactgcccggttgaggacatcccggctattgaacgtgaagagctgccaatgaaaccagaggacattgacatgaatccggaggcgctgaccgcatggaaacgtgcggcagcagcggtctatcgtaaggccaaagccagaaagagccgtcgtatctccctggaattcatgcttgagcaggcgaacaaattcgctaaccacaaagccatctggtttccgtataatatggattggcgtggtcgtgtttacgcggtatcgatgttcaacccgcagggtaatgacatgaccaagggtttgttgaccttggccaaaggtaaaccgattggcaaagaaggttactattggttgaagatccacggtgcgaactgcgcaggggtggataaggtaccgttcccggaacgtattaaattcatcgaggaaaaccacgaaaacattatggcgtgcgcaaagagcccgctggaaaacacgtggtgggcagagcaggacagtccattctgcttcttggcgttctgtttcgaatatgcaggtgtccagcaccacggcctgagctataactgcagcctgccgctggcctttgatggttcttgtagcggtattcaacactttagcgccatgctgcgcgatgaggttggtggcagagcagtgaatctgctgccaagcgaaaccgtgcaagatatctatggcattgtggctaagaaggttaatgaaatcctgcaagcagacgcgattaacggcacggacaacgaggttgtcaccgtgaccgatgaaaacaccggtgagatctcggagaaagtgaaactgggcaccaaagccttggctggccaatggctggcatacggcgttactcgctccgtgaccaagcgttcggtgatgacccttgcttacggcagcaaagagtttggtttccgccaacaggttctggaggatactatccaaccggccatcgactctggtaaaggcctgatgttcacgcagccgaatcaggcagcgggctatatggcgaagctgatttgggaatcggttagcgttaccgttgttgcagcggtggaggctatgaactggctgaaatctgcggcgaagctgttagctgcggaggtgaaggacaagaagacgggcgaaatcctgcgtaagcgctgcgcagtgcattgggttacgccggatggttttccggtatggcaggagtacaaaaagcctattcagacccgtctgaacctgatgtttctgggtcaatttcgtctgcagccgacgatcaacaccaataaggactccgagatcgacgcgcacaaacaggagtctggcatcgcacccaatttcgttcactcacaggacggttcccatctgcgtaagaccgtcgtgtgggcacacgagaagtatggcattgagtcgtttgcattgatccacgattcctttggtaccatcccggcggacgctgcgaacctgtttaaagcggttcgcgaaaccatggttgacacctatgaaagttgcgatgttctggcagacttttatgatcagttcgccgaccaactgcatgagtcccagctggataaaatgccggcgttaccggcgaagggcaacttaaatctccgcgacatcctggaatctgatttcgccttcgcgtaa

SEQ ID NO: 237 - DNA, 2649 bp, synthetic construct
  source 1..2649: mol_type = other DNA
atgaatacaattaacatagctaaaaatgatttcagcgatattgaactggctgcgatcccgtttaataccttggcggaccattatggtgagcgtctggcgcgtgagcaacttgctctggagcacgaatcctacgagatgggtgaagcgcgtttccggaagatgttcgagcgccagcttaaggctggcgaggtggcggataacgctgctgcgaagccgttgattacgaccctgctgccgaaaatgattgcgcgtattaacgattggttcgaggaagtgaaagcaaagcgtggtaaacgtccaaccgcattccagtttctgcaagagatcaagccggaggcggtggcatacattacgatcaaaaccactctcgcatgtctcaccagcgcggataatactacggtccaagcggtggccagcgcgattggccgcgcgattgaggacgaagcgcgttttggtcgcattcgtgacctggaagcgaaacattttaagaagaacgttgaagaacaattgaatcgcgtgggccacgtttacaagaaagcgttcatgcaagtcgttgaagctgatatgctgagcaaaggcctgttaggtggtgaagcatggagcagctggcataaggaggactcaattcacgtcggcgtgcggtgcattgaaatgctgatcgaatcgaccggtatggttagcctgcatcgccaaaacgccggcgtggtgggtcaagatagcgaaacgattgaactggcgccagagtacgcggaagctatcgctaccagagccggcgcattggcggggatcagcccgatgttccagccgtgtgttgtaccaccgaagccgtggaccggtatcaccggtggaggttactgggcgaatggtagacgtccgttggcgttggttgctacccatagcaaaaaggctctgatgcgttatgaagacgtttacatgccggaagtgtacaaagccatcaacatcgcgcagaacactgcgtggaaaatcaacaaaaaggtgttagctgtggcgaacgtaattacaaaatggaagcactgcccggttgaggacatcccggctattgaacgtgaagagctgccaatgaaaccagaggacattgacatgaatccggaggcgctgaccgcatggaaacgtgcggcagcagcggtctatcgtagtgataaagccagaaagagccgtcgtatctccctggaattcatgcttgagcaggcgaacaaattcgctaaccacaaagccatctggtttccgtataatatggattggcgtggtcgtgtttacgcggtatcgatgttcaacccgcagggtaatgacatgaccaagggtttgttgaccttggccaaaggtaaaccgattggcaaagaaggttactattggttgaagatccacggtgcgaactgcgcaggggtggataaggtaccgttcccggaacgtattaaattcatcgaggaaaaccacgaaaacattatggcgtgcgcaaagagcccgctggaaaacacgtggtgggcagagcaggacagtccattctgcttcttggcgttctgtttcgaatatgcaggtgtccagcaccacggcctgagctataactgcagcctgccgctggcctttgatggttcttgtagcggtattcaacactttagcgccatgctgcgcgatgaggttggtggcagagcagtgaatctgctgccaagcgaaaccgtgcaagatatctatggcattgtggctaagaaggttaatgaaatcctgcaagcagacgcgattaacggcacggacaacgaggttgtcaccgtgaccgatgaaaacaccggtgagatctcggagaaagtgaaactgggcaccaaagccttggctggccaatggctggcatacggcgttactcgctccgtgaccaagcgttcggtgatgacccttgcttacggcagcaaagagtttggtttccgccaacaggttctggaggatactatccaaccggccatcgactctggtaaaggcctgatgttcacgcagccgaatcaggcagcgggctatatggcgaagctgatttgggaatcggttagcgttaccgttgttgcagcggtggaggctatgaactggctgaaatctgcggcgaagctgttagctgcggaggtgaaggacaagaagacgggcgaaatcctgcgtaagcgctgcgcagtgcattgggttacgccggatggttttccggtatggcaggagtacaaaaagcctattcagacccgtctgaacctgatgtttctgggtcaatttcgtctgcagccgacgatcaacaccaataaggactccgagatcgacgcgcacaaacaggagtctggcatcgcacccaatttcgttcactcacaggacggttcccatctgcgtaagaccgtcgtgtgggcacacgagaagtatggcattgagtcgtttgcattgatccacgattcctttggtaccatcccggcggacgctgcgaacctgtttaaagcggttcgcgaaaccatggttgacacctatgaaagttgcgatgttctggcagacttttatgatcagttcgccgaccaactgcatgagtcccagctggataaaatgccggcgttaccggcgaagggcaacttaaatctccgcgacatcctggaatctgatttcgccttcgcgtaa

SEQ ID NO: 238 - DNA, 2652 bp, synthetic construct
  source 1..2652: mol_type = other DNA
atgaatacaattaacatagctaaaaatgatttcagcgatattgaactggctgcgatcccgtttaataccttggcggaccattatggtgagcgtctggcgcgtgagcaacttgctctggagcacgaatcctacgagatgggtgaagcgcgtttccggaagatgttcgagcgccagcttaaggctggcgaggtggcggataacgctgctgcgaagccgttgattacgaccctgctgccgaaaatgattgcgcgtattaacgattggttcgaggaagtgaaagcaaagcgtggtaaacgtccaaccgcattccagtttctgcaagagatcaagccggaggcggtggcatacattacgatcaaaaccactctcgcatgtctcaccagcgcggataatactacggtccaagcggtggccagcgcgattggccgcgcgattgaggacgaagcgcgttttggtcgcattcgtgacctggaagcgaaacattttaagaagaacgttgaagaacaattgaataaacgcgtgggccacgtttacaagaaagcgttcatgcaagtcgttgaagctgatatgctgagcaaaggcctgttaggtggtgaagcatggagcagctggcataaggaggactcaattcacgtcggcgtgcggtgcattgaaatgctgatcgaatcgaccggtatggttagcctgcatcgccaaaacgccggcgtggtgggtcaagatagcgaaacgattgaactggcgccagagtacgcggaagctatcgctaccagagccggcgcattggcggggatcagcccgatgttccagccgtgtgttgtaccaccgaagccgtggaccggtatcaccggtggaggttactgggcgaatggtagacgtccgttggcgttggttcgtacccatagcaaaaaggctctgatgcgttatgaagacgtttacatgccggaagtgtacaaagccatcaacatcgcgcagaacactgcgtggaaaatcaacaaaaaggtgttagctgtggcgaacgtaattacaaaatggaagcactgcccggttgaggacatcccggctattgaacgtgaagagctgccaatgaaaccagaggacattgacatgaatccggaggcgctgaccgcatggaaacgtgcggcagcagcggtcgcccgttacgataaagccagaaagagccgtcgtatctccctggaattcatgcttgagcaggcgaacaaattcgctaaccacaaagccatctggtttccgtataatatggattggcgtggtcgtgtttacgcggtatcgatgttcaacccgcagggtaatgacatgaccaagggtttgttgaccttggccaaaggtaaaccgattggcaaagaaggttactattggttgaagatccacggtgcgaactgcgcaggggtggataaggtaccgttcccggaacgtattaaattcatcgaggaaaaccacgaaaacattatggcgtgcgcaaagagcccgctggaaaacacgtggtgggcagagcaggacagtccattctgcttcttggcgttctgtttcgaatatgcaggtgtccagcaccacggcctgagctataactgcagcctgccgctggcctttgatggttcttgtagcggtattcaacactttagcgccatgctgcgcgatgaggttggtggcagagcagtgaatctgctgccaagcgaaaccgtgcaagatatctatggcattgtggctaagaaggttaatgaaatcctgcaagcagacgcgattaacggcacggacaacgaggttgtcaccgtgaccgatgaaaacaccggtgagatctcggagaaagtgaaactgggcaccaaagccttggctggccaatggctggcatacggcgttactcgctccgtgaccaagcgttcggtgatgacccttgcttacggcagcaaagagtttggtttccgccaacaggttctggaggatactatccaaccggccatcgactctggtaaaggcctgatgttcacgcagccgaatcaggcagcgggctatatggcgaagctgatttgggaatcggttagcgttaccgttgttgcagcggtggaggctatgaactggctgaaatctgcggcgaagctgttagctgcggaggtgaaggacaagaagacgggcgaaatcctgcgtaagcgctgcgcagtgcattgggttacgccggatggttttccggtatggcaggagtacaaaaagcctattcagacccgtctgaacctgatgtttctgggtcaatttcgtctgcagccgacgatcaacaccaataaggactccgagatcgacgcgcacaaacaggagtctggcatcgcacccaatttcgttcactcacaggacggttcccatctgcgtaagaccgtcgtgtgggcacacgagaagtatggcattgagtcgtttgcattgatccacgattcctttggtaccatcccggcggacgctgcgaacctgtttaaagcggttcgcgaaaccatggttgacacctatgaaagttgcgatgttctggcagacttttatgatcagttcgccgaccaactgcatgagtcccagctggataaaatgccggcgttaccggcgaagggcaacttaaatctccgcgacatcctggaatctgatttcgccttcgcgtaa

SEQ ID NO: 239 - DNA, 2652 bp, synthetic construct
  source 1..2652: mol_type = other DNA
atgaatacaattaacatagctaaaaatgatttcagcgatattgaactggctgcgatcccgtttaataccttggcggaccattatggtgagcgtctggcgcgtgagcaacttgctctggagcacgaatcctacgagatgggtgaagcgcgtttccggaagatgttcgagcgccagcttaaggctggcgaggtggcggataacgctgctgcgaagccgttgattacgaccctgctgccgaaaatgattgcgcgtattaacgattggttcgaggaagtgaaagcaaagcgtggtaaacgtccaaccgcattccagtttctgcaagagatcaagccggaggcggtggcatacattacgatcaaaaccactctcgcatgtctcaccagcgcggataatactacggtccaagcggtggccagcgcgattggccgcgcgattgaggacgaagcgcgttttggtcgcattcgtgacctggaagcgaaacattttaagaagaacgttgaagaacaattgaataaacgcgtgggccacgtttacaagaaagcgttcatgcaagtcgttgaagctgatatgctgagcaaaggcctgttaggtggtgaagcatggagcagctggcataaggaggactcaattcacgtcggcgtgcggtgcattgaaatgctgatcgaatcgaccggtatggttagcctgcatcgccaaaacgccggcgtggtgggtcaagatagcgaaacgattgaactggcgccagagtacgcggaagctatcgctaccagagccggcgcattggcggggatcagcccgatgttccagccgtgtgttgtaccaccgaagccgtggaccggtatcaccggtggaggttactgggcgaatggtagacgtccgttggcgttggttcgtacccatagcaaaaaggctctgatgcgttatgaagacgtttacatgccggaagtgtacaaagccatcaacatcgcgcagaacactgcgtggaaaatcaacaaaaaggtgttagctgtggcgaacgtaattacaaaatggaagcactgcccggttgaggacatcccggctattgaacgtgaagagctgccaatgaaaccagaggacattgacatgaatccggaggcgctgaccgcatggaaacgtgcggcagcagcggtcgcccgtagtgataaagccagaaagagccgtcgtatctccctggaattcatgcttgagcaggcgaacaaattcgctaaccacaaagccatctggtttccgtataatatggattggcgtggtcgtgtttacgcggtatcgatgttcaacccgcagggtaatgacatgaccaagggtttgttgaccttggccaaaggtaaaccgattggcaaagaaggttactattggttgaagatccacggtgcgaactgcgcaggggtggataaggtaccgttcccggaacgtattaaattcatcgaggaaaaccacgaaaacattatggcgtgcgcaaagagcccgctggaaaacacgtggtgggcagagcaggacagtccattctgcttcttggcgttctgtttcgaatatgcaggtgtccagcaccacggcctgagctataactgcagcctgccgctggcctttgatggttcttgtagcggtattcaacactttagcgccatgctgcgcgatgaggttggtggcagagcagtgaatctgctgccaagcgaaaccgtgcaagatatctatggcattgtggctaagaaggttaatgaaatcctgcaagcagacgcgattaacggcacggacaacgaggttgtcaccgtgaccgatgaaaacaccggtgagatctcggagaaagtgaaactgggcaccaaagccttggctggccaatggctggcatacggcgttactcgctccgtgaccaagcgttcggtgatgacccttgcttacggcagcaaagagtttggtttccgccaacaggttctggaggatactatccaaccggccatcgactctggtaaaggcctgatgttcacgcagccgaatcaggcagcgggctatatggcgaagctgatttgggaatcggttagcgttaccgttgttgcagcggtggaggctatgaactggctgaaatctgcggcgaagctgttagctgcggaggtgaaggacaagaagacgggcgaaatcctgcgtaagcgctgcgcagtgcattgggttacgccggatggttttccggtatggcaggagtacaaaaagcctattcagacccgtctgaacctgatgtttctgggtcaatttcgtctgcagccgacgatcaacaccaataaggactccgagatcgacgcgcacaaacaggagtctggcatcgcacccaatttcgttcactcacaggacggttcccatctgcgtaagaccgtcgtgtgggcacacgagaagtatggcattgagtcgtttgcattgatccacgattcctttggtaccatcccggcggacgctgcgaacctgtttaaagcggttcgcgaaaccatggttgacacctatgaaagttgcgatgttctggcagacttttatgatcagttcgccgaccaactgcatgagtcccagctggataaaatgccggcgttaccggcgaagggcaacttaaatctccgcgacatcctggaatctgatttcgccttcgcgtaa

SEQ ID NO: 240 - DNA, 2652 bp, synthetic construct
  source 1..2652: mol_type = other DNA
atgaatacaattaacatagctaaaaatgatttcagcgatattgaactggctgcgatcccgtttaataccttggcggaccattatggtgagcgtctggcgcgtgagcaacttgctctggagcacgaatcctacgagatgggtgaagcgcgtttccggaagatgttcgagcgccagcttaaggctggcgaggtggcggataacgctgctgcgaagccgttgattacgaccctgctgccgaaaatgattgcgcgtattaacgattggttcgaggaagtgaaagcaaagcgtggtaaacgtccaaccgcattccagtttctgcaagagatcaagccggaggcggtggcatacattacgatcaaaaccactctcgcatgtctcaccagcgcggataatactacggtccaagcggtggccagcgcgattggccgcgcgattgaggacgaagcgcgttttggtcgcattcgtgacctggaagcgaaacattttaagaagaacgttgaagaacaattgaataaacgcgtgggccacgtttacaagaaagcgttcatgcaagtcgttgaagctgatatgctgagcaaaggcctgttaggtggtgaagcatggagcagctggcataaggaggactcaattcacgtcggcgtgcggtgcattgaaatgctgatcgaatcgaccggtatggttagcctgcatcgccaaaacgccggcgtggtgggtcaagatagcgaaacgattgaactggcgccagagtacgcggaagctatcgctaccagagccggcgcattggcggggatcagcccgatgttccagccgtgtgttgtaccaccgaagccgtggaccggtatcaccggtggaggttactgggcgaatggtagacgtccgttggcgttggttcgtacccatagcaaaaaggctctgatgcgttatgaagacgtttacatgccggaagtgtacaaagccatcaacatcgcgcagaacactgcgtggaaaatcaacaaaaaggtgttagctgtggcgaacgtaattacaaaatggaagcactgcccggttgaggacatcccggctattgaacgtgaagagctgccaatgaaaccagaggacattgacatgaatccggaggcgctgaccgcatggaaacgtgcggcagcagcggtcgcccgtaagggtaaagccagaaagagccgtcgtatctccctggaattcatgcttgagcaggcgaacaaattcgctaaccacaaagccatctggtttccgtataatatggattggcgtggtcgtgtttacgcggtatcgatgttcaacccgcagggtaatgacatgaccaagggtttgttgaccttggccaaaggtaaaccgattggcaaagaaggttactattggttgaagatccacggtgcgaactgcgcaggggtggataaggtaccgttcccggaacgtattaaattcatcgaggaaaaccacgaaaacattatggcgtgcgcaaagagcccgctggaaaacacgtggtgggcagagcaggacagtccattctgcttcttggcgttctgtttcgaatatgcaggtgtccagcaccacggcctgagctataactgcagcctgccgctggcctttgatggttcttgtagcggtattcaacactttagcgccatgctgcgcgatgaggttggtggcagagcagtgaatctgctgccaagcgaaaccgtgcaagatatctatggcattgtggctaagaaggttaatgaaatcctgcaagcagacgcgattaacggcacggacaacgaggttgtcaccgtgaccgatgaaaacaccggtgagatctcggagaaagtgaaactgggcaccaaagccttggctggccaatggctggcatacggcgttactcgctccgtgaccaagcgttcggtgatgacccttgcttacggcagcaaagagtttggtttccgccaacaggttctggaggatactatccaaccggccatcgactctggtaaaggcctgatgttcacgcagccgaatcaggcagcgggctatatggcgaagctgatttgggaatcggttagcgttaccgttgttgcagcggtggaggctatgaactggctgaaatctgcggcgaagctgttagctgcggaggtgaaggacaagaagacgggcgaaatcctgcgtaagcgctgcgcagtgcattgggttacgccggatggttttccggtatggcaggagtacaaaaagcctattcagacccgtctgaacctgatgtttctgggtcaatttcgtctgcagccgacgatcaacaccaataaggactccgagatcgacgcgcacaaacaggagtctggcatcgcacccaatttcgttcactcacaggacggttcccatctgcgtaagaccgtcgtgtgggcacacgagaagtatggcattgagtcgtttgcattgatccacgattcctttggtaccatcccggcggacgctgcgaacctgtttaaagcggttcgcgaaaccatggttgacacctatgaaagttgcgatgttctggcagacttttatgatcagttcgccgaccaactgcatgagtcccagctggataaaatgccggcgttaccggcgaagggcaacttaaatctccgcgacatcctggaatctgatttcgccttcgcgtaa

SEQ ID NO: 241 - DNA, 2652 bp, synthetic construct
  source 1..2652: mol_type = other DNA
atgaatacaattaacatagctaaaaatgatttcagcgatattgaactggctgcgatcccgtttaataccttggcggaccattatggtgagcgtctggcgcgtgagcaacttgctctggagcacgaatcctacgagatgggtgaagcgcgtttccggaagatgttcgagcgccagcttaaggctggcgaggtggcggataacgctgctgcgaagccgttgattacgaccctgctgccgaaaatgattgcgcgtattaacgattggttcgaggaagtgaaagcaaagcgtggtaaacgtccaaccgcattccagtttctgcaagagatcaagccggaggcggtggcatacattacgatcaaaaccactctcgcatgtctcaccagcgcggataatactacggtccaagcggtggccagcgcgattggccgcgcgattgaggacgaagcgcgttttggtcgcattcgtgacctggaagcgaaacattttaagaagaacgttgaagaacaattgaataaacgcgtgggccacgtttacaagaaagcgttcatgcaagtcgttgaagctgatatgctgagcaaaggcctgttaggtggtgaagcatggagcagctggcataaggaggactcaattcacgtcggcgtgcggtgcattgaaatgctgatcgaatcgaccggtatggttagcctgcatcgccaaaacgccggcgtggtgggtcaagatagcgaaacgattgaactggcgccagagtacgcggaagctatcgctaccagagccggcgcattggcggggatcagcccgatgttccagccgtgtgttgtaccaccgaagccgtggaccggtatcaccggtggaggttactgggcgaatggtagacgtccgttggcgttggttcgtacccatagcaaaaaggctctgatgcgttatgaagacgtttacatgccggaagtgtacaaagccatcaacatcgcgcagaacactgcgtggaaaatcaacaaaaaggtgttagctgtggcgaacgtaattacaaaatggaagcactgcccggttgaggacatcccggctattgaacgtgaagagctgccaatgaaaccagaggacattgacatgaatccggaggcgctgaccgcatggaaacgtgcggcagcagcggtctatcgttacgccaaagccagaaagagccgtcgtatctccctggaattcatgcttgagcaggcgaacaaattcgctaaccacaaagccatctggtttccgtataatatggattggcgtggtcgtgtttacgcggtatcgatgttcaacccgcagggtaatgacatgaccaagggtttgttgaccttggccaaaggtaaaccgattggcaaagaaggttactattggttgaagatccacggtgcgaactgcgcaggggtggataaggtaccgttcccggaacgtattaaattcatcgaggaaaaccacgaaaacattatggcgtgcgcaaagagcccgctggaaaacacgtggtgggcagagcaggacagtccattctgcttcttggcgttctgtttcgaatatgcaggtgtccagcaccacggcctgagctataactgcagcctgccgctggcctttgatggttcttgtagcggtattcaacactttagcgccatgctgcgcgatgaggttggtggcagagcagtgaatctgctgccaagcgaaaccgtgcaagatatctatggcattgtggctaagaaggttaatgaaatcctgcaagcagacgcgattaacggcacggacaacgaggttgtcaccgtgaccgatgaaaacaccggtgagatctcggagaaagtgaaactgggcaccaaagccttggctggccaatggctggcatacggcgttactcgctccgtgaccaagcgttcggtgatgacccttgcttacggcagcaaagagtttggtttccgccaacaggttctggaggatactatccaaccggccatcgactctggtaaaggcctgatgttcacgcagccgaatcaggcagcgggctatatggcgaagctgatttgggaatcggttagcgttaccgttgttgcagcggtggaggctatgaactggctgaaatctgcggcgaagctgttagctgcggaggtgaaggacaagaagacgggcgaaatcctgcgtaagcgctgcgcagtgcattgggttacgccggatggttttccggtatggcaggagtacaaaaagcctattcagacccgtctgaacctgatgtttctgggtcaatttcgtctgcagccgacgatcaacaccaataaggactccgagatcgacgcgcacaaacaggagtctggcatcgcacccaatttcgttcactcacaggacggttcccatctgcgtaagaccgtcgtgtgggcacacgagaagtatggcattgagtcgtttgcattgatccacgattcctttggtaccatcccggcggacgctgcgaacctgtttaaagcggttcgcgaaaccatggttgacacctatgaaagttgcgatgttctggcagacttttatgatcagttcgccgaccaactgcatgagtcccagctggataaaatgccggcgttaccggcgaagggcaacttaaatctccgcgacatcctggaatctgatttcgccttcgcgtaa

SEQ ID NO: 242 - DNA, 2652 bp, synthetic construct
  source 1..2652: mol_type = other DNA
atgaatacaattaacatagctaaaaatgatttcagcgatattgaactggctgcgatcccgtttaataccttggcggaccattatggtgagcgtctggcgcgtgagcaacttgctctggagcacgaatcctacgagatgggtgaagcgcgtttccggaagatgttcgagcgccagcttaaggctggcgaggtggcggataacgctgctgcgaagccgttgattacgaccctgctgccgaaaatgattgcgcgtattaacgattggttcgaggaagtgaaagcaaagcgtggtaaacgtccaaccgcattccagtttctgcaagagatcaagccggaggcggtggcatacattacgatcaaaaccactctcgcatgtctcaccagcgcggataatactacggtccaagcggtggccagcgcgattggccgcgcgattgaggacgaagcgcgttttggtcgcattcgtgacctggaagcgaaacattttaagaagaacgttgaagaacaattgaataaacgcgtgggccacgtttacaagaaagcgttcatgcaagtcgttgaagctgatatgctgagcaaaggcctgttaggtggtgaagcatggagcagctggcataaggaggactcaattcacgtcggcgtgcggtgcattgaaatgctgatcgaatcgaccggtatggttagcctgcatcgccaaaacgccggcgtggtgggtcaagatagcgaaacgattgaactggcgccagagtacgcggaagctatcgctaccagagccggcgcattggcggggatcagcccgatgttccagccgtgtgttgtaccaccgaagccgtggaccggtatcaccggtggaggttactgggcgaatggtagacgtccgttggcgttggttcgtacccatagcaaaaaggctctgatgcgttatgaagacgtttacatgccggaagtgtacaaagccatcaacatcgcgcagaacactgcgtggaaaatcaacaaaaaggtgttagctgtggcgaacgtaattacaaaatggaagcactgcccggttgaggacatcccggctattgaacgtgaagagctgccaatgaaaccagaggacattgacatgaatccggaggcgctgaccgcatggaaacgtgcggcagcagcggtctatcgttacggtaaagccagaaagagccgtcgtatctccctggaattcatgcttgagcaggcgaacaaattcgctaaccacaaagccatctggtttccgtataatatggattggcgtggtcgtgtttacgcggtatcgatgttcaacccgcagggtaatgacatgaccaagggtttgttgaccttggccaaaggtaaaccgattggcaaagaaggttactattggttgaagatccacggtgcgaactgcgcaggggtggataaggtaccgttcccggaacgtattaaattcatcgaggaaaaccacgaaaacattatggcgtgcgcaaagagcccgctggaaaacacgtggtgggcagagcaggacagtccattctgcttcttggcgttctgtttcgaatatgcaggtgtccagcaccacggcctgagctataactgcagcctgccgctggcctttgatggttcttgtagcggtattcaacactttagcgccatgctgcgcgatgaggttggtggcagagcagtgaatctgctgccaagcgaaaccgtgcaagatatctatggcattgtggctaagaaggttaatgaaatcctgcaagcagacgcgattaacggcacggacaacgaggttgtcaccgtgaccgatgaaaacaccggtgagatctcggagaaagtgaaactgggcaccaaagccttggctggccaatggctggcatacggcgttactcgctccgtgaccaagcgttcggtgatgacccttgcttacggcagcaaagagtttggtttccgccaacaggttctggaggatactatccaaccggccatcgactctggtaaaggcctgatgttcacgcagccgaatcaggcagcgggctatatggcgaagctgatttgggaatcggttagcgttaccgttgttgcagcggtggaggctatgaactggctgaaatctgcggcgaagctgttagctgcggaggtgaaggacaagaagacgggcgaaatcctgcgtaagcgctgcgcagtgcattgggttacgccggatggttttccggtatggcaggagtacaaaaagcctattcagacccgtctgaacctgatgtttctgggtcaatttcgtctgcagccgacgatcaacaccaataaggactccgagatcgacgcgcacaaacaggagtctggcatcgcacccaatttcgttcactcacaggacggttcccatctgcgtaagaccgtcgtgtgggcacacgagaagtatggcattgagtcgtttgcattgatccacgattcctttggtaccatcccggcggacgctgcgaacctgtttaaagcggttcgcgaaaccatggttgacacctatgaaagttgcgatgttctggcagacttttatgatcagttcgccgaccaactgcatgagtcccagctggataaaatgccggcgttaccggcgaagggcaacttaaatctccgcgacatcctggaatctgatttcgccttcgcgtaa

SEQ ID NO: 243 - DNA, 2652 bp, synthetic construct
  source 1..2652: mol_type = other DNA
atgaatacaattaacatagctaaaaatgatttcagcgatattgaactggctgcgatcccgtttaataccttggcggaccattatggtgagcgtctggcgcgtgagcaacttgctctggagcacgaatcctacgagatgggtgaagcgcgtttccggaagatgttcgagcgccagcttaaggctggcgaggtggcggataacgctgctgcgaagccgttgattacgaccctgctgccgaaaatgattgcgcgtattaacgattggttcgaggaagtgaaagcaaagcgtggtaaacgtccaaccgcattccagtttctgcaagagatcaagccggaggcggtggcatacattacgatcaaaaccactctcgcatgtctcaccagcgcggataatactacggtccaagcggtggccagcgcgattggccgcgcgattgaggacgaagcgcgttttggtcgcattcgtgacctggaagcgaaacattttaagaagaacgttgaagaacaattgaataaacgcgtgggccacgtttacaagaaagcgttcatgcaagtcgttgaagctgatatgctgagcaaaggcctgttaggtggtgaagcatggagcagctggcataaggaggactcaattcacgtcggcgtgcggtgcattgaaatgctgatcgaatcgaccggtatggttagcctgcatcgccaaaacgccggcgtggtgggtcaagatagcgaaacgattgaactggcgccagagtacgcggaagctatcgctaccagagccggcgcattggcggggatcagcccgatgttccagccgtgtgttgtaccaccgaagccgtggaccggtatcaccggtggaggttactgggcgaatggtagacgtccgttggcgttggttcgtacccatagcaaaaaggctctgatgcgttatgaagacgtttacatgccggaagtgtacaaagccatcaacatcgcgcagaacactgcgtggaaaatcaacaaaaaggtgttagctgtggcgaacgtaattacaaaatggaagcactgcccggttgaggacatcccggctattgaacgtgaagagctgccaatgaaaccagaggacattgacatgaatccggaggcgctgaccgcatggaaacgtgcggcagcagcggtctatcgtagtgccaaagccagaaagagccgtcgtatctccctggaattcatgcttgagcaggcgaacaaattcgctaaccacaaagccatctggtttccgtataatatggattggcgtggtcgtgtttacgcggtatcgatgttcaacccgcagggtaatgacatgaccaagggtttgttgaccttggccaaaggtaaaccgattggcaaagaaggttactattggttgaagatccacggtgcgaactgcgcaggggtggataaggtaccgttcccggaacgtattaaattcatcgaggaaaaccacgaaaacattatggcgtgcgcaaagagcccgctggaaaacacgtggtgggcagagcaggacagtccattctgcttcttggcgttctgtttcgaatatgcaggtgtccagcaccacggcctgagctataactgcagcctgccgctggcctttgatggttcttgtagcggtattcaacactttagcgccatgctgcgcgatgaggttggtggcagagcagtgaatctgctgccaagcgaaaccgtgcaagatatctatggcattgtggctaagaaggttaatgaaatcctgcaagcagacgcgattaacggcacggacaacgaggttgtcaccgtgaccgatgaaaacaccggtgagatctcggagaaagtgaaactgggcaccaaagccttggctggccaatggctggcatacggcgttactcgctccgtgaccaagcgttcggtgatgacccttgcttacggcagcaaagagtttggtttccgccaacaggttctggaggatactatccaaccggccatcgactctggtaaaggcctgatgttcacgcagccgaatcaggcagcgggctatatggcgaagctgatttgggaatcggttagcgttaccgttgttgcagcggtggaggctatgaactggctgaaatctgcggcgaagctgttagctgcggaggtgaaggacaagaagacgggcgaaatcctgcgtaagcgctgcgcagtgcattgggttacgccggatggttttccggtatggcaggagtacaaaaagcctattcagacccgtctgaacctgatgtttctgggtcaatttcgtctgcagccgacgatcaacaccaataaggactccgagatcgacgcgcacaaacaggagtctggcatcgcacccaatttcgttcactcacaggacggttcccatctgcgtaagaccgtcgtgtgggcacacgagaagtatggcattgagtcgtttgcattgatccacgattcctttggtaccatcccggcggacgctgcgaacctgtttaaagcggttcgcgaaaccatggttgacacctatgaaagttgcgatgttctggcagacttttatgatcagttcgccgaccaactgcatgagtcccagctggataaaatgccggcgttaccggcgaagggcaacttaaatctccgcgacatcctggaatctgatttcgccttcgcgtaa

SEQ ID NO: 244 - DNA, 2652 bp, synthetic construct
  source 1..2652: mol_type = other DNA
atgaatacaattaacatagctaaaaatgatttcagcgatattgaactggctgcgatcccgtttaataccttggcggaccattatggtgagcgtctggcgcgtgagcaacttgctctggagcacgaatcctacgagatgggtgaagcgcgtttccggaagatgttcgagcgccagcttaaggctggcgaggtggcggataacgctgctgcgaagccgttgattacgaccctgctgccgaaaatgattgcgcgtattaacgattggttcgaggaagtgaaagcaaagcgtggtaaacgtccaaccgcattccagtttctgcaagagatcaagccggaggcggtggcatacattacgatcaaaaccactctcgcatgtctcaccagcgcggataatactacggtccaagcggtggccagcgcgattggccgcgcgattgaggacgaagcgcgttttggtcgcattcgtgacctggaagcgaaacattttaagaagaacgttgaagaacaattgaataaacgcgtgggccacgtttacaagaaagcgttcatgcaagtcgttgaagctgatatgctgagcaaaggcctgttaggtggtgaagcatggagcagctggcataaggaggactcaattcacgtcggcgtgcggtgcattgaaatgctgatcgaatcgaccggtatggttagcctgcatcgccaaaacgccggcgtggtgggtcaagatagcgaaacgattgaactggcgccagagtacgcggaagctatcgctaccagagccggcgcattggcggggatcagcccgatgttccagccgtgtgttgtaccaccgaagccgtggaccggtatcaccggtggaggttactgggcgaatggtagacgtccgttggcgttggttcgtacccatagcaaaaaggctctgatgcgttatgaagacgtttacatgccggaagtgtacaaagccatcaacatcgcgcagaacactgcgtggaaaatcaacaaaaaggtgttagctgtggcgaacgtaattacaaaatggaagcactgcccggttgaggacatcccggctattgaacgtgaagagctgccaatgaaaccagaggacattgacatgaatccggaggcgctgaccgcatggaaacgtgcggcagcagcggtcgcccgttacggtaaagccagaaagagccgtcgtatctccctggaattcatgcttgagcaggcgaacaaattcgctaaccacaaagccatctggtttccgtataatatggattggcgtggtcgtgtttacgcggtatcgatgttcaacccgcagggtaatgacatgaccaagggtttgttgaccttggccaaaggtaaaccgattggcaaagaaggttactattggttgaagatccacggtgcgaactgcgcaggggtggataaggtaccgttcccggaacgtattaaattcatcgaggaaaaccacgaaaacattatggcgtgcgcaaagagcccgctggaaaacacgtggtgggcagagcaggacagtccattctgcttcttggcgttctgtttcgaatatgcaggtgtccagcaccacggcctgagctataactgcagcctgccgctggcctttgatggttcttgtagcggtattcaacactttagcgccatgctgcgcgatgaggttggtggcagagcagtgaatctgctgccaagcgaaaccgtgcaagatatctatggcattgtggctaagaaggttaatgaaatcctgcaagcagacgcgattaacggcacggacaacgaggttgtcaccgtgaccgatgaaaacaccggtgagatctcggagaaagtgaaactgggcaccaaagccttggctggccaatggctggcatacggcgttactcgctccgtgaccaagcgttcggtgatgacccttgcttacggcagcaaagagtttggtttccgccaacaggttctggaggatactatccaaccggccatcgactctggtaaaggcctgatgttcacgcagccgaatcaggcagcgggctatatggcgaagctgatttgggaatcggttagcgttaccgttgttgcagcggtggaggctatgaactggctgaaatctgcggcgaagctgttagctgcggaggtgaaggacaagaagacgggcgaaatcctgcgtaagcgctgcgcagtgcattgggttacgccggatggttttccggtatggcaggagtacaaaaagcctattcagacccgtctgaacctgatgtttctgggtcaatttcgtctgcagccgacgatcaacaccaataaggactccgagatcgacgcgcacaaacaggagtctggcatcgcacccaatttcgttcactcacaggacggttcccatctgcgtaagaccgtcgtgtgggcacacgagaagtatggcattgagtcgtttgcattgatccacgattcctttggtaccatcccggcggacgctgcgaacctgtttaaagcggttcgcgaaaccatggttgacacctatgaaagttgcgatgttctggcagacttttatgatcagttcgccgaccaactgcatgagtcccagctggataaaatgccggcgttaccggcgaagggcaacttaaatctccgcgacatcctggaatctgatttcgccttcgcgtaa

SEQ ID NO: 245 - DNA, 2652 bp, synthetic construct
  source 1..2652: mol_type = other DNA
atgaatacaattaacatagctaaaaatgatttcagcgatattgaactggctgcgatcccgtttaataccttggcggaccattatggtgagcgtctggcgcgtgagcaacttgctctggagcacgaatcctacgagatgggtgaagcgcgtttccggaagatgttcgagcgccagcttaaggctggcgaggtggcggataacgctgctgcgaagccgttgattacgaccctgctgccgaaaatgattgcgcgtattaacgattggttcgaggaagtgaaagcaaagcgtggtaaacgtccaaccgcattccagtttctgcaagagatcaagccggaggcggtggcatacattacgatcaaaaccactctcgcatgtctcaccagcgcggataatactacggtccaagcggtggccagcgcgattggccgcgcgattgaggacgaagcgcgttttggtcgcattcgtgacctggaagcgaaacattttaagaagaacgttgaagaacaattgaataaacgcgtgggccacgtttacaagaaagcgttcatgcaagtcgttgaagctgatatgctgagcaaaggcctgttaggtggtgaagcatggagcagctggcataaggaggactcaattcacgtcggcgtgcggtgcattgaaatgctgatcgaatcgaccggtatggttagcctgcatcgccaaaacgccggcgtggtgggtcaagatagcgaaacgattgaactggcgccagagtacgcggaagctatcgctaccagagccggcgcattggcggggatcagcccgatgttccagccgtgtgttgtaccaccgaagccgtggaccggtatcaccggtggaggttactgggcgaatggtagacgtccgttggcgttggttcgtacccatagcaaaaaggctctgatgcgttatgaagacgtttacatgccggaagtgtacaaagccatcaacatcgcgcagaacactgcgtggaaaatcaacaaaaaggtgttagctgtggcgaacgtaattacaaaatggaagcactgcccggttgaggacatcccggctattgaacgtgaagagctgccaatgaaaccagaggacattgacatgaatccggaggcgctgaccgcatggaaacgtgcggcagcagcggtcgcccgtagtggtaaagccagaaagagccgtcgtatctccctggaattcatgcttgagcaggcgaacaaattcgctaaccacaaagccatctggtttccgtataatatggattggcgtggtcgtgtttacgcggtatcgatgttcaacccgcagggtaatgacatgaccaagggtttgttgaccttggccaaaggtaaaccgattggcaaagaaggttactattggttgaagatccacggtgcgaactgcgcaggggtggataaggtaccgttcccggaacgtattaaattcatcgaggaaaaccacgaaaacattatggcgtgcgcaaagagcccgctggaaaacacgtggtgggcagagcaggacagtccattctgcttcttggcgttctgtttcgaatatgcaggtgtccagcaccacggcctgagctataactgcagcctgccgctggcctttgatggttcttgtagcggtattcaacactttagcgccatgctgcgcgatgaggttggtggcagagcagtgaatctgctgccaagcgaaaccgtgcaagatatctatggcattgtggctaagaaggttaatgaaatcctgcaagcagacgcgattaacggcacggacaacgaggttgtcaccgtgaccgatgaaaacaccggtgagatctcggagaaagtgaaactgggcaccaaagccttggctggccaatggctggcatacggcgttactcgctccgtgaccaagcgttcggtgatgacccttgcttacggcagcaaagagtttggtttccgccaacaggttctggaggatactatccaaccggccatcgactctggtaaaggcctgatgttcacgcagccgaatcaggcagcgggctatatggcgaagctgatttgggaatcggttagcgttaccgttgttgcagcggtggaggctatgaactggctgaaatctgcggcgaagctgttagctgcggaggtgaaggacaagaagacgggcgaaatcctgcgtaagcgctgcgcagtgcattgggttacgccggatggttttccggtatggcaggagtacaaaaagcctattcagacccgtctgaacctgatgtttctgggtcaatttcgtctgcagccgacgatcaacaccaataaggactccgagatcgacgcgcacaaacaggagtctggcatcgcacccaatttcgttcactcacaggacggttcccatctgcgtaagaccgtcgtgtgggcacacgagaagtatggcattgagtcgtttgcattgatccacgattcctttggtaccatcccggcggacgctgcgaacctgtttaaagcggttcgcgaaaccatggttgacacctatgaaagttgcgatgttctggcagacttttatgatcagttcgccgaccaactgcatgagtcccagctggataaaatgccggcgttaccggcgaagggcaacttaaatctccgcgacatcctggaatctgatttcgccttcgcgtaa

SEQ ID NO: 246 - DNA, 2652 bp, synthetic construct
  source 1..2652: mol_type = other DNA
atgaatacaattaacatagctaaaaatgatttcagcgatattgaactggctgcgatcccgtttaataccttggcggaccattatggtgagcgtctggcgcgtgagcaacttgctctggagcacgaatcctacgagatgggtgaagcgcgtttccggaagatgttcgagcgccagcttaaggctggcgaggtggcggataacgctgctgcgaagccgttgattacgaccctgctgccgaaaatgattgcgcgtattaacgattggttcgaggaagtgaaagcaaagcgtggtaaacgtccaaccgcattccagtttctgcaagagatcaagccggaggcggtggcatacattacgatcaaaaccactctcgcatgtctcaccagcgcggataatactacggtccaagcggtggccagcgcgattggccgcgcgattgaggacgaagcgcgttttggtcgcattcgtgacctggaagcgaaacattttaagaagaacgttgaagaacaattgaataaacgcgtgggccacgtttacaagaaagcgttcatgcaagtcgttgaagctgatatgctgagcaaaggcctgttaggtggtgaagcatggagcagctggcataaggaggactcaattcacgtcggcgtgcggtgcattgaaatgctgatcgaatcgaccggtatggttagcctgcatcgccaaaacgccggcgtggtgggtcaagatagcgaaacgattgaactggcgccagagtacgcggaagctatcgctaccagagccggcgcattggcggggatcagcccgatgttccagccgtgtgttgtaccaccgaagccgtggaccggtatcaccggtggaggttactgggcgaatggtagacgtccgttggcgttggttcgtacccatagcaaaaaggctctgatgcgttatgaagacgtttacatgccggaagtgtacaaagccatcaacatcgcgcagaacactgcgtggaaaatcaacaaaaaggtgttagctgtggcgaacgtaattacaaaatggaagcactgcccggttgaggacatcccggctattgaacgtgaagagctgccaatgaaaccagaggacattgacatgaatccggaggcgctgaccgcatggaaacgtgcggcagcagcggtcgcccgttacgccaaagccagaaagagccgtcgtatctccctggaattcatgcttgagcaggcgaacaaattcgctaaccacaaagccatctggtttccgtataatatggattggcgtggtcgtgtttacgcggtatcgatgttcaacccgcagggtaatgacatgaccaagggtttgttgaccttggccaaaggtaaaccgattggcaaagaaggttactattggttgaagatccacggtgcgaactgcgcaggggtggataaggtaccgttcccggaacgtattaaattcatcgaggaaaaccacgaaaacattatggcgtgcgcaaagagcccgctggaaaacacgtggtgggcagagcaggacagtccattctgcttcttggcgttctgtttcgaatatgcaggtgtccagcaccacggcctgagctataactgcagcctgccgctggcctttgatggttcttgtagcggtattcaacactttagcgccatgctgcgcgatgaggttggtggcagagcagtgaatctgctgccaagcgaaaccgtgcaagatatctatggcattgtggctaagaaggttaatgaaatcctgcaagcagacgcgattaacggcacggacaacgaggttgtcaccgtgaccgatgaaaacaccggtgagatctcggagaaagtgaaactgggcaccaaagccttggctggccaatggctggcatacggcgttactcgctccgtgaccaagcgttcggtgatgacccttgcttacggcagcaaagagtttggtttccgccaacaggttctggaggatactatccaaccggccatcgactctggtaaaggcctgatgttcacgcagccgaatcaggcagcgggctatatggcgaagctgatttgggaatcggttagcgttaccgttgttgcagcggtggaggctatgaactggctgaaatctgcggcgaagctgttagctgcggaggtgaaggacaagaagacgggcgaaatcctgcgtaagcgctgcgcagtgcattgggttacgccggatggttttccggtatggcaggagtacaaaaagcctattcagacccgtctgaacctgatgtttctgggtcaatttcgtctgcagccgacgatcaacaccaataaggactccgagatcgacgcgcacaaacaggagtctggcatcgcacccaatttcgttcactcacaggacggttcccatctgcgtaagaccgtcgtgtgggcacacgagaagtatggcattgagtcgtttgcattgatccacgattcctttggtaccatcccggcggacgctgcgaacctgtttaaagcggttcgcgaaaccatggttgacacctatgaaagttgcgatgttctggcagacttttatgatcagttcgccgaccaactgcatgagtcccagctggataaaatgccggcgttaccggcgaagggcaacttaaatctccgcgacatcctggaatctgatttcgccttcgcgtaa

SEQ ID NO: 247 - DNA, 2652 bp, synthetic construct
  source 1..2652: mol_type = other DNA
atgaatacaattaacatagctaaaaatgatttcagcgatattgaactggctgcgatcccgtttaataccttggcggaccattatggtgagcgtctggcgcgtgagcaacttgctctggagcacgaatcctacgagatgggtgaagcgcgtttccggaagatgttcgagcgccagcttaaggctggcgaggtggcggataacgctgctgcgaagccgttgattacgaccctgctgccgaaaatgattgcgcgtattaacgattggttcgaggaagtgaaagcaaagcgtggtaaacgtccaaccgcattccagtttctgcaagagatcaagccggaggcggtggcatacattacgatcaaaaccactctcgcatgtctcaccagcgcggataatactacggtccaagcggtggccagcgcgattggccgcgcgattgaggacgaagcgcgttttggtcgcattcgtgacctggaagcgaaacattttaagaagaacgttgaagaacaattgaataaacgcgtgggccacgtttacaagaaagcgttcatgcaagtcgttgaagctgatatgctgagcaaaggcctgttaggtggtgaagcatggagcagctggcataaggaggactcaattcacgtcggcgtgcggtgcattgaaatgctgatcgaatcgaccggtatggttagcctgcatcgccaaaacgccggcgtggtgggtcaagatagcgaaacgattgaactggcgccagagtacgcggaagctatcgctaccagagccggcgcattggcggggatcagcccgatgttccagccgtgtgttgtaccaccgaagccgtggaccggtatcaccggtggaggttactgggcgaatggtagacgtccgttggcgttggttcgtacccatagcaaaaaggctctgatgcgttatgaagacgtttacatgccggaagtgtacaaagccatcaacatcgcgcagaacactgcgtggaaaatcaacaaaaaggtgttagctgtggcgaacgtaattacaaaatggaagcactgcccggttgaggacatcccggctattgaacgtgaagagctgccaatgaaaccagaggacattgacatgaatccggaggcgctgaccgcatggaaacgtgcggcagcagcggtcgcccgtagtgccaaagccagaaagagccgtcgtatctccctggaattcatgcttgagcaggcgaacaaattcgctaaccacaaagccatctggtttccgtataatatggattggcgtggtcgtgtttacgcggtatcgatgttcaacccgcagggtaatgacatgaccaagggtttgttgaccttggccaaaggtaaaccgattggcaaagaaggttactattggttgaagatccacggtgcgaactgcgcaggggtggataaggtaccgttcccggaacgtattaaattcatcgaggaaaaccacgaaaacattatggcgtgcgcaaagagcccgctggaaaacacgtggtgggcagagcaggacagtccattctgcttcttggcgttctgtttcgaatatgcaggtgtccagcaccacggcctgagctataactgcagcctgccgctggcctttgatggttcttgtagcggtattcaacactttagcgccatgctgcgcgatgaggttggtggcagagcagtgaatctgctgccaagcgaaaccgtgcaagatatctatggcattgtggctaagaaggttaatgaaatcctgcaagcagacgcgattaacggcacggacaacgaggttgtcaccgtgaccgatgaaaacaccggtgagatctcggagaaagtgaaactgggcaccaaagccttggctggccaatggctggcatacggcgttactcgctccgtgaccaagcgttcggtgatgacccttgcttacggcagcaaagagtttggtttccgccaacaggttctggaggatactatccaaccggccatcgactctggtaaaggcctgatgttcacgcagccgaatcaggcagcgggctatatggcgaagctgatttgggaatcggttagcgttaccgttgttgcagcggtggaggctatgaactggctgaaatctgcggcgaagctgttagctgcggaggtgaaggacaagaagacgggcgaaatcctgcgtaagcgctgcgcagtgcattgggttacgccggatggttttccggtatggcaggagtacaaaaagcctattcagacccgtctgaacctgatgtttctgggtcaatttcgtctgcagccgacgatcaacaccaataaggactccgagatcgacgcgcacaaacaggagtctggcatcgcacccaatttcgttcactcacaggacggttcccatctgcgtaagaccgtcgtgtgggcacacgagaagtatggcattgagtcgtttgcattgatccacgattcctttggtaccatcccggcggacgctgcgaacctgtttaaagcggttcgcgaaaccatggttgacacctatgaaagttgcgatgttctggcagacttttatgatcagttcgccgaccaactgcatgagtcccagctggataaaatgccggcgttaccggcgaagggcaacttaaatctccgcgacatcctggaatctgatttcgccttcgcgtaa

SEQ ID NO: 248 - DNA, 2652 bp, synthetic construct
  source 1..2652: mol_type = other DNA
atgaatacaattaacatagctaaaaatgatttcagcgatattgaactggctgcgatcccgtttaataccttggcggaccattatggtgagcgtctggcgcgtgagcaacttgctctggagcacgaatcctacgagatgggtgaagcgcgtttccggaagatgttcgagcgccagcttaaggctggcgaggtggcggataacgctgctgcgaagccgttgattacgaccctgctgccgaaaatgattgcgcgtattaacgattggttcgaggaagtgaaagcaaagcgtggtaaacgtccaaccgcattccagtttctgcaagagatcaagccggaggcggtggcatacattacgatcaaaaccactctcgcatgtctcaccagcgcggataatactacggtccaagcggtggccagcgcgattggccgcgcgattgaggacgaagcgcgttttggtcgcattcgtgacctggaagcgaaacattttaagaagaacgttgaagaacaattgaatcatcgcgtgggccacgtttacaagaaagcgttcatgcaagtcgttgaagctgatatgctgagcaaaggcctgttaggtggtgaagcatggagcagctggcataaggaggactcaattcacgtcggcgtgcggtgcattgaaatgctgatcgaatcgaccggtatggttagcctgcatcgccaaaacgccggcgtggtgggtcaagatagcgaaacgattgaactggcgccagagtacgcggaagctatcgctaccagagccggcgcattggcggggatcagcccgatgttccagccgtgtgttgtaccaccgaagccgtggaccggtatcaccggtggaggttactgggcgaatggtagacgtccgttggcgttggttcgtacccatagcaaaaaggctctgatgcgttatgaagacgtttacatgccggaagtgtacaaagccatcaacatcgcgcagaacactgcgtggaaaatcaacaaaaaggtgttagctgtggcgaacgtaattacaaaatggaagcactgcccggttgaggacatcccggctattgaacgtgaagagctgccaatgaaaccagaggacattgacatgaatccggaggcgctgaccgcatggaaacgtgcggcagcagcggtctatcgtaaggataaagccagaaagagccgtcgtatctccctggaattcatgcttgagcaggcgaacaaattcgctaaccacaaagccatctggtttccgtataatatggattggcgtggtcgtgtttacgcggtatcgatgttcaacccgcagggtaatgacatgaccaagggtttgttgaccttggccaaaggtaaaccgattggcaaagaaggttactattggttgaagatccacggtgcgaactgcgcaggggtggataaggtaccgttcccggaacgtattaaattcatcgaggaaaaccacgaaaacattatggcgtgcgcaaagagcccgctggaaaacacgtggtgggcagagcaggacagtccattctgcttcttggcgttctgtttcgaatatgcaggtgtccagcaccacggcctgagctataactgcagcctgccgctggcctttgatggttcttgtagcggtattcaacactttagcgccatgctgcgcgatgaggttggtggcagagcagtgaatctgctgccaagcgaaaccgtgcaagatatctatggcattgtggctaagaaggttaatgaaatcctgcaagcagacgcgattaacggcacggacaacgaggttgtcaccgtgaccgatgaaaacaccggtgagatctcggagaaagtgaaactgggcaccaaagccttggctggccaatggctggcatacggcgttactcgctccgtgaccaagcgttcggtgatgacccttgcttacggcagcaaagagtttggtttccgccaacaggttctggaggatactatccaaccggccatcgactctggtaaaggcctgatgttcacgcagccgaatcaggcagcgggctatatggcgaagctgatttgggaatcggttagcgttaccgttgttgcagcggtggaggctatgaactggctgaaatctgcggcgaagctgttagctgcggaggtgaaggacaagaagacgggcgaaatcctgcgtaagcgctgcgcagtgcattgggttacgccggatggttttccggtatggcaggagtacaaaaagcctattcagacccgtctgaacctgatgtttctgggtcaatttcgtctgcagccgacgatcaacaccaataaggactccgagatcgacgcgcacaaacaggagtctggcatcgcacccaatttcgttcactcacaggacggttcccatctgcgtaagaccgtcgtgtgggcacacgagaagtatggcattgagtcgtttgcattgatccacgattcctttggtaccatcccggcggacgctgcgaacctgtttaaagcggttcgcgaaaccatggttgacacctatgaaagttgcgatgttctggcagacttttatgatcagttcgccgaccaactgcatgagtcccagctggataaaatgccggcgttaccggcgaagggcaacttaaatctccgcgacatcctggaatctgatttcgccttcgcgtaa

SEQ ID NO: 249 - DNA, 2652 bp, synthetic construct
  source 1..2652: mol_type = other DNA
atgaatacaattaacatagctaaaaatgatttcagcgatattgaactggctgcgatcccgtttaataccttggcggaccattatggtgagcgtctggcgcgtgagcaacttgctctggagcacgaatcctacgagatgggtgaagcgcgtttccggaagatgttcgagcgccagcttaaggctggcgaggtggcggataacgctgctgcgaagccgttgattacgaccctgctgccgaaaatgattgcgcgtattaacgattggttcgaggaagtgaaagcaaagcgtggtaaacgtccaaccgcattccagtttctgcaagagatcaagccggaggcggtggcatacattacgatcaaaaccactctcgcatgtctcaccagcgcggataatactacggtccaagcggtggccagcgcgattggccgcgcgattgaggacgaagcgcgttttggtcgcattcgtgacctggaagcgaaacattttaagaagaacgttgaagaacaattgaattatcgcgtgggccacgtttacaagaaagcgttcatgcaagtcgttgaagctgatatgctgagcaaaggcctgttaggtggtgaagcatggagcagctggcataaggaggactcaattcacgtcggcgtgcggtgcattgaaatgctgatcgaatcgaccggtatggttagcctgcatcgccaaaacgccggcgtggtgggtcaagatagcgaaacgattgaactggcgccagagtacgcggaagctatcgctaccagagccggcgcattggcggggatcagcccgatgttccagccgtgtgttgtaccaccgaagccgtggaccggtatcaccggtggaggttactgggcgaatggtagacgtccgttggcgttggttcgtacccatagcaaaaaggctctgatgcgttatgaagacgtttacatgccggaagtgtacaaagccatcaacatcgcgcagaacactgcgtggaaaatcaacaaaaaggtgttagctgtggcgaacgtaattacaaaatggaagcactgcccggttgaggacatcccggctattgaacgtgaagagctgccaatgaaaccagaggacattgacatgaatccggaggcgctgaccgcatggaaacgtgcggcagcagcggtctatcgtaaggataaagccagaaagagccgtcgtatctccctggaattcatgcttgagcaggcgaacaaattcgctaaccacaaagccatctggtttccgtataatatggattggcgtggtcgtgtttacgcggtatcgatgttcaacccgcagggtaatgacatgaccaagggtttgttgaccttggccaaaggtaaaccgattggcaaagaaggttactattggttgaagatccacggtgcgaactgcgcaggggtggataaggtaccgttcccggaacgtattaaattcatcgaggaaaaccacgaaaacattatggcgtgcgcaaagagcccgctggaaaacacgtggtgggcagagcaggacagtccattctgcttcttggcgttctgtttcgaatatgcaggtgtccagcaccacggcctgagctataactgcagcctgccgctggcctttgatggttcttgtagcggtattcaacactttagcgccatgctgcgcgatgaggttggtggcagagcagtgaatctgctgccaagcgaaaccgtgcaagatatctatggcattgtggctaagaaggttaatgaaatcctgcaagcagacgcgattaacggcacggacaacgaggttgtcaccgtgaccgatgaaaacaccggtgagatctcggagaaagtgaaactgggcaccaaagccttggctggccaatggctggcatacggcgttactcgctccgtgaccaagcgttcggtgatgacccttgcttacggcagcaaagagtttggtttccgccaacaggttctggaggatactatccaaccggccatcgactctggtaaaggcctgatgttcacgcagccgaatcaggcagcgggctatatggcgaagctgatttgggaatcggttagcgttaccgttgttgcagcggtggaggctatgaactggctgaaatctgcggcgaagctgttagctgcggaggtgaaggacaagaagacgggcgaaatcctgcgtaagcgctgcgcagtgcattgggttacgccggatggttttccggtatggcaggagtacaaaaagcctattcagacccgtctgaacctgatgtttctgggtcaatttcgtctgcagccgacgatcaacaccaataaggactccgagatcgacgcgcacaaacaggagtctggcatcgcacccaatttcgttcactcacaggacggttcccatctgcgtaagaccgtcgtgtgggcacacgagaagtatggcattgagtcgtttgcattgatccacgattcctttggtaccatcccggcggacgctgcgaacctgtttaaagcggttcgcgaaaccatggttgacacctatgaaagttgcgatgttctggcagacttttatgatcagttcgccgaccaactgcatgagtcccagctggataaaatgccggcgttaccggcgaagggcaacttaaatctccgcgacatcctggaatctgatttcgccttcgcgtaa

SEQ ID NO: 250 - DNA, 2652 bp, synthetic construct
  source 1..2652: mol_type = other DNA
atgaatacaattaacatagctaaaaatgatttcagcgatattgaactggctgcgatcccgtttaataccttggcggaccattatggtgagcgtctggcgcgtgagcaacttgctctggagcacgaatcctacgagatgggtgaagcgcgtttccggaagatgttcgagcgccagcttaaggctggcgaggtggcggataacgctgctgcgaagccgttgattacgaccctgctgccgaaaatgattgcgcgtattaacgattggttcgaggaagtgaaagcaaagcgtggtaaacgtccaaccgcattccagtttctgcaagagatcaagccggaggcggtggcatacattacgatcaaaaccactctcgcatgtctcaccagcgcggataatactacggtccaagcggtggccagcgcgattggccgcgcgattgaggacgaagcgcgttttggtcgcattcgtgacctggaagcgaaacattttaagaagaacgttgaagaacaattgaattcacgcgtgggccacgtttacaagaaagcgttcatgcaagtcgttgaagctgatatgctgagcaaaggcctgttaggtggtgaagcatggagcagctggcataaggaggactcaattcacgtcggcgtgcggtgcattgaaatgctgatcgaatcgaccggtatggttagcctgcatcgccaaaacgccggcgtggtgggtcaagatagcgaaacgattgaactggcgccagagtacgcggaagctatcgctaccagagccggcgcattggcggggatcagcccgatgttccagccgtgtgttgtaccaccgaagccgtggaccggtatcaccggtggaggttactgggcgaatggtagacgtccgttggcgttggttcgtacccatagcaaaaaggctctgatgcgttatgaagacgtttacatgccggaagtgtacaaagccatcaacatcgcgcagaacactgcgtggaaaatcaacaaaaaggtgttagctgtggcgaacgtaattacaaaatggaagcactgcccggttgaggacatcccggctattgaacgtgaagagctgccaatgaaaccagaggacattgacatgaatccggaggcgctgaccgcatggaaacgtgcggcagcagcggtctatcgtaaggataaagccagaaagagccgtcgtatctccctggaattcatgcttgagcaggcgaacaaattcgctaaccacaaagccatctggtttccgtataatatggattggcgtggtcgtgtttacgcggtatcgatgttcaacccgcagggtaatgacatgaccaagggtttgttgaccttggccaaaggtaaaccgattggcaaagaaggttactattggttgaagatccacggtgcgaactgcgcaggggtggataaggtaccgttcccggaacgtattaaattcatcgaggaaaaccacgaaaacattatggcgtgcgcaaagagcccgctggaaaacacgtggtgggcagagcaggacagtccattctgcttcttggcgttctgtttcgaatatgcaggtgtccagcaccacggcctgagctataactgcagcctgccgctggcctttgatggttcttgtagcggtattcaacactttagcgccatgctgcgcgatgaggttggtggcagagcagtgaatctgctgccaagcgaaaccgtgcaagatatctatggcattgtggctaagaaggttaatgaaatcctgcaagcagacgcgattaacggcacggacaacgaggttgtcaccgtgaccgatgaaaacaccggtgagatctcggagaaagtgaaactgggcaccaaagccttggctggccaatggctggcatacggcgttactcgctccgtgaccaagcgttcggtgatgacccttgcttacggcagcaaagagtttggtttccgccaacaggttctggaggatactatccaaccggccatcgactctggtaaaggcctgatgttcacgcagccgaatcaggcagcgggctatatggcgaagctgatttgggaatcggttagcgttaccgttgttgcagcggtggaggctatgaactggctgaaatctgcggcgaagctgttagctgcggaggtgaaggacaagaagacgggcgaaatcctgcgtaagcgctgcgcagtgcattgggttacgccggatggttttccggtatggcaggagtacaaaaagcctattcagacccgtctgaacctgatgtttctgggtcaatttcgtctgcagccgacgatcaacaccaataaggactccgagatcgacgcgcacaaacaggagtctggcatcgcacccaatttcgttcactcacaggacggttcccatctgcgtaagaccgtcgtgtgggcacacgagaagtatggcattgagtcgtttgcattgatccacgattcctttggtaccatcccggcggacgctgcgaacctgtttaaagcggttcgcgaaaccatggttgacacctatgaaagttgcgatgttctggcagacttttatgatcagttcgccgaccaactgcatgagtcccagctggataaaatgccggcgttaccggcgaagggcaacttaaatctccgcgacatcctggaatctgatttcgccttcgcgtaa

SEQ ID NO: 251 - DNA, 2652 bp, synthetic construct
  source 1..2652: mol_type = other DNA
atgaatacaattaacatagctaaaaatgatttcagcgatattgaactggctgcgatcccgtttaataccttggcggaccattatggtgagcgtctggcgcgtgagcaacttgctctggagcacgaatcctacgagatgggtgaagcgcgtttccggaagatgttcgagcgccagcttaaggctggcgaggtggcggataacgctgctgcgaagccgttgattacgaccctgctgccgaaaatgattgcgcgtattaacgattggttcgaggaagtgaaagcaaagcgtggtaaacgtccaaccgcattccagtttctgcaagagatcaagccggaggcggtggcatacattacgatcaaaaccactctcgcatgtctcaccagcgcggataatactacggtccaagcggtggccagcgcgattggccgcgcgattgaggacgaagcgcgttttggtcgcattcgtgacctggaagcgaaacattttaagaagaacgttgaagaacaattgaattggcgcgtgggccacgtttacaagaaagcgttcatgcaagtcgttgaagctgatatgctgagcaaaggcctgttaggtggtgaagcatggagcagctggcataaggaggactcaattcacgtcggcgtgcggtgcattgaaatgctgatcgaatcgaccggtatggttagcctgcatcgccaaaacgccggcgtggtgggtcaagatagcgaaacgattgaactggcgccagagtacgcggaagctatcgctaccagagccggcgcattggcggggatcagcccgatgttccagccgtgtgttgtaccaccgaagccgtggaccggtatcaccggtggaggttactgggcgaatggtagacgtccgttggcgttggttcgtacccatagcaaaaaggctctgatgcgttatgaagacgtttacatgccggaagtgtacaaagccatcaacatcgcgcagaacactgcgtggaaaatcaacaaaaaggtgttagctgtggcgaacgtaattacaaaatggaagcactgcccggttgaggacatcccggctattgaacgtgaagagctgccaatgaaaccagaggacattgacatgaatccggaggcgctgaccgcatggaaacgtgcggcagcagcggtctatcgtaaggataaagccagaaagagccgtcgtatctccctggaattcatgcttgagcaggcgaacaaattcgctaaccacaaagccatctggtttccgtataatatggattggcgtggtcgtgtttacgcggtatcgatgttcaacccgcagggtaatgacatgaccaagggtttgttgaccttggccaaaggtaaaccgattggcaaagaaggttactattggttgaagatccacggtgcgaactgcgcaggggtggataaggtaccgttcccggaacgtattaaattcatcgaggaaaaccacgaaaacattatggcgtgcgcaaagagcccgctggaaaacacgtggtgggcagagcaggacagtccattctgcttcttggcgttctgtttcgaatatgcaggtgtccagcaccacggcctgagctataactgcagcctgccgctggcctttgatggttcttgtagcggtattcaacactttagcgccatgctgcgcgatgaggttggtggcagagcagtgaatctgctgccaagcgaaaccgtgcaagatatctatggcattgtggctaagaaggttaatgaaatcctgcaagcagacgcgattaacggcacggacaacgaggttgtcaccgtgaccgatgaaaacaccggtgagatctcggagaaagtgaaactgggcaccaaagccttggctggccaatggctggcatacggcgttactcgctccgtgaccaagcgttcggtgatgacccttgcttacggcagcaaagagtttggtttccgccaacaggttctggaggatactatccaaccggccatcgactctggtaaaggcctgatgttcacgcagccgaatcaggcagcgggctatatggcgaagctgatttgggaatcggttagcgttaccgttgttgcagcggtggaggctatgaactggctgaaatctgcggcgaagctgttagctgcggaggtgaaggacaagaagacgggcgaaatcctgcgtaagcgctgcgcagtgcattgggttacgccggatggttttccggtatggcaggagtacaaaaagcctattcagacccgtctgaacctgatgtttctgggtcaatttcgtctgcagccgacgatcaacaccaataaggactccgagatcgacgcgcacaaacaggagtctggcatcgcacccaatttcgttcactcacaggacggttcccatctgcgtaagaccgtcgtgtgggcacacgagaagtatggcattgagtcgtttgcattgatccacgattcctttggtaccatcccggcggacgctgcgaacctgtttaaagcggttcgcgaaaccatggttgacacctatgaaagttgcgatgttctggcagacttttatgatcagttcgccgaccaactgcatgagtcccagctggataaaatgccggcgttaccggcgaagggcaacttaaatctccgcgacatcctggaatctgatttcgccttcgcgtaa

SEQ ID NO: 252 - DNA, 2652 bp, synthetic construct
  source 1..2652: mol_type = other DNA
atgaatacaattaacatagctaaaaatgatttcagcgatattgaactggctgcgatcccgtttaataccttggcggaccattatggtgagcgtctggcgcgtgagcaacttgctctggagcacgaatcctacgagatgggtgaagcgcgtttccggaagatgttcgagcgccagcttaaggctggcgaggtggcggataacgctgctgcgaagccgttgattacgaccctgctgccgaaaatgattgcgcgtattaacgattggttcgaggaagtgaaagcaaagcgtggtaaacgtccaaccgcattccagtttctgcaagagatcaagccggaggcggtggcatacattacgatcaaaaccactctcgcatgtctcaccagcgcggataatactacggtccaagcggtggccagcgcgattggccgcgcgattgaggacgaagcgcgttttggtcgcattcgtgacctggaagcgaaacattttaagaagaacgttgaagaacaattgaattttcgcgtgggccacgtttacaagaaagcgttcatgcaagtcgttgaagctgatatgctgagcaaaggcctgttaggtggtgaagcatggagcagctggcataaggaggactcaattcacgtcggcgtgcggtgcattgaaatgctgatcgaatcgaccggtatggttagcctgcatcgccaaaacgccggcgtggtgggtcaagatagcgaaacgattgaactggcgccagagtacgcggaagctatcgctaccagagccggcgcattggcggggatcagcccgatgttccagccgtgtgttgtaccaccgaagccgtggaccggtatcaccggtggaggttactgggcgaatggtagacgtccgttggcgttggttcgtacccatagcaaaaaggctctgatgcgttatgaagacgtttacatgccggaagtgtacaaagccatcaacatcgcgcagaacactgcgtggaaaatcaacaaaaaggtgttagctgtggcgaacgtaattacaaaatggaagcactgcccggttgaggacatcccggctattgaacgtgaagagctgccaatgaaaccagaggacattgacatgaatccggaggcgctgaccgcatggaaacgtgcggcagcagcggtctatcgtaaggataaagccagaaagagccgtcgtatctccctggaattcatgcttgagcaggcgaacaaattcgctaaccacaaagccatctggtttccgtataatatggattggcgtggtcgtgtttacgcggtatcgatgttcaacccgcagggtaatgacatgaccaagggtttgttgaccttggccaaaggtaaaccgattggcaaagaaggttactattggttgaagatccacggtgcgaactgcgcaggggtggataaggtaccgttcccggaacgtattaaattcatcgaggaaaaccacgaaaacattatggcgtgcgcaaagagcccgctggaaaacacgtggtgggcagagcaggacagtccattctgcttcttggcgttctgtttcgaatatgcaggtgtccagcaccacggcctgagctataactgcagcctgccgctggcctttgatggttcttgtagcggtattcaacactttagcgccatgctgcgcgatgaggttggtggcagagcagtgaatctgctgccaagcgaaaccgtgcaagatatctatggcattgtggctaagaaggttaatgaaatcctgcaagcagacgcgattaacggcacggacaacgaggttgtcaccgtgaccgatgaaaacaccggtgagatctcggagaaagtgaaactgggcaccaaagccttggctggccaatggctggcatacggcgttactcgctccgtgaccaagcgttcggtgatgacccttgcttacggcagcaaagagtttggtttccgccaacaggttctggaggatactatccaaccggccatcgactctggtaaaggcctgatgttcacgcagccgaatcaggcagcgggctatatggcgaagctgatttgggaatcggttagcgttaccgttgttgcagcggtggaggctatgaactggctgaaatctgcggcgaagctgttagctgcggaggtgaaggacaagaagacgggcgaaatcctgcgtaagcgctgcgcagtgcattgggttacgccggatggttttccggtatggcaggagtacaaaaagcctattcagacccgtctgaacctgatgtttctgggtcaatttcgtctgcagccgacgatcaacaccaataaggactccgagatcgacgcgcacaaacaggagtctggcatcgcacccaatttcgttcactcacaggacggttcccatctgcgtaagaccgtcgtgtgggcacacgagaagtatggcattgagtcgtttgcattgatccacgattcctttggtaccatcccggcggacgctgcgaacctgtttaaagcggttcgcgaaaccatggttgacacctatgaaagttgcgatgttctggcagacttttatgatcagttcgccgaccaactgcatgagtcccagctggataaaatgccggcgttaccggcgaagggcaacttaaatctccgcgacatcctggaatctgatttcgccttcgcgtaa

SEQ ID NO: 253 - DNA, 2652 bp, synthetic construct
  source 1..2652: mol_type = other DNA
atgaatacaattaacatagctaaaaatgatttcagcgatattgaactggctgcgatcccgtttaataccttggcggaccattatggtgagcgtctggcgcgtgagcaacttgctctggagcacgaatcctacgagatgggtgaagcgcgtttccggaagatgttcgagcgccagcttaaggctggcgaggtggcggataacgctgctgcgaagccgttgattacgaccctgctgccgaaaatgattgcgcgtattaacgattggttcgaggaagtgaaagcaaagcgtggtaaacgtccaaccgcattccagtttctgcaagagatcaagccggaggcggtggcatacattacgatcaaaaccactctcgcatgtctcaccagcgcggataatactacggtccaagcggtggccagcgcgattggccgcgcgattgaggacgaagcgcgttttggtcgcattcgtgacctggaagcgaaacattttaagaagaacgttgaagaacaattgaatatacgcgtgggccacgtttacaagaaagcgttcatgcaagtcgttgaagctgatatgctgagcaaaggcctgttaggtggtgaagcatggagcagctggcataaggaggactcaattcacgtcggcgtgcggtgcattgaaatgctgatcgaatcgaccggtatggttagcctgcatcgccaaaacgccggcgtggtgggtcaagatagcgaaacgattgaactggcgccagagtacgcggaagctatcgctaccagagccggcgcattggcggggatcagcccgatgttccagccgtgtgttgtaccaccgaagccgtggaccggtatcaccggtggaggttactgggcgaatggtagacgtccgttggcgttggttcgtacccatagcaaaaaggctctgatgcgttatgaagacgtttacatgccggaagtgtacaaagccatcaacatcgcgcagaacactgcgtggaaaatcaacaaaaaggtgttagctgtggcgaacgtaattacaaaatggaagcactgcccggttgaggacatcccggctattgaacgtgaagagctgccaatgaaaccagaggacattgacatgaatccggaggcgctgaccgcatggaaacgtgcggcagcagcggtctatcgtaaggataaagccagaaagagccgtcgtatctccctggaattcatgcttgagcaggcgaacaaattcgctaaccacaaagccatctggtttccgtataatatggattggcgtggtcgtgtttacgcggtatcgatgttcaacccgcagggtaatgacatgaccaagggtttgttgaccttggccaaaggtaaaccgattggcaaagaaggttactattggttgaagatccacggtgcgaactgcgcaggggtggataaggtaccgttcccggaacgtattaaattcatcgaggaaaaccacgaaaacattatggcgtgcgcaaagagcccgctggaaaacacgtggtgggcagagcaggacagtccattctgcttcttggcgttctgtttcgaatatgcaggtgtccagcaccacggcctgagctataactgcagcctgccgctggcctttgatggttcttgtagcggtattcaacactttagcgccatgctgcgcgatgaggttggtggcagagcagtgaatctgctgccaagcgaaaccgtgcaagatatctatggcattgtggctaagaaggttaatgaaatcctgcaagcagacgcgattaacggcacggacaacgaggttgtcaccgtgaccgatgaaaacaccggtgagatctcggagaaagtgaaactgggcaccaaagccttggctggccaatggctggcatacggcgttactcgctccgtgaccaagcgttcggtgatgacccttgcttacggcagcaaagagtttggtttccgccaacaggttctggaggatactatccaaccggccatcgactctggtaaaggcctgatgttcacgcagccgaatcaggcagcgggctatatggcgaagctgatttgggaatcggttagcgttaccgttgttgcagcggtggaggctatgaactggctgaaatctgcggcgaagctgttagctgcggaggtgaaggacaagaagacgggcgaaatcctgcgtaagcgctgcgcagtgcattgggttacgccggatggttttccggtatggcaggagtacaaaaagcctattcagacccgtctgaacctgatgtttctgggtcaatttcgtctgcagccgacgatcaacaccaataaggactccgagatcgacgcgcacaaacaggagtctggcatcgcacccaatttcgttcactcacaggacggttcccatctgcgtaagaccgtcgtgtgggcacacgagaagtatggcattgagtcgtttgcattgatccacgattcctttggtaccatcccggcggacgctgcgaacctgtttaaagcggttcgcgaaaccatggttgacacctatgaaagttgcgatgttctggcagacttttatgatcagttcgccgaccaactgcatgagtcccagctggataaaatgccggcgttaccggcgaagggcaacttaaatctccgcgacatcctggaatctgatttcgccttcgcgtaa

SEQ ID NO: 254 - DNA, 2652 bp, synthetic construct
  source 1..2652: mol_type = other DNA
atgaatacaattaacatagctaaaaatgatttcagcgatattgaactggctgcgatcccgtttaataccttggcggaccattatggtgagcgtctggcgcgtgagcaacttgctctggagcacgaatcctacgagatgggtgaagcgcgtttccggaagatgttcgagcgccagcttaaggctggcgaggtggcggataacgctgctgcgaagccgttgattacgaccctgctgccgaaaatgattgcgcgtattaacgattggttcgaggaagtgaaagcaaagcgtggtaaacgtccaaccgcattccagtttctgcaagagatcaagccggaggcggtggcatacattacgatcaaaaccactctcgcatgtctcaccagcgcggataatactacggtccaagcggtggccagcgcgattggccgcgcgattgaggacgaagcgcgttttggtcgcattcgtgacctggaagcgaaacattttaagaagaacgttgaagaacaattgaatatgcgcgtgggccacgtttacaagaaagcgttcatgcaagtcgttgaagctgatatgctgagcaaaggcctgttaggtggtgaagcatggagcagctggcataaggaggactcaattcacgtcggcgtgcggtgcattgaaatgctgatcgaatcgaccggtatggttagcctgcatcgccaaaacgccggcgtggtgggtcaagatagcgaaacgattgaactggcgccagagtacgcggaagctatcgctaccagagccggcgcattggcggggatcagcccgatgttccagccgtgtgttgtaccaccgaagccgtggaccggtatcaccggtggaggttactgggcgaatggtagacgtccgttggcgttggttcgtacccatagcaaaaaggctctgatgcgttatgaagacgtttacatgccggaagtgtacaaagccatcaacatcgcgcagaacactgcgtggaaaatcaacaaaaaggtgttagctgtggcgaacgtaattacaaaatggaagcactgcccggttgaggacatcccggctattgaacgtgaagagctgccaatgaaaccagaggacattgacatgaatccggaggcgctgaccgcatggaaacgtgcggcagcagcggtctatcgtaaggataaagccagaaagagccgtcgtatctccctggaattcatgcttgagcaggcgaacaaattcgctaaccacaaagccatctggtttccgtataatatggattggcgtggtcgtgtttacgcggtatcgatgttcaacccgcagggtaatgacatgaccaagggtttgttgaccttggccaaaggtaaaccgattggcaaagaaggttactattggttgaagatccacggtgcgaactgcgcaggggtggataaggtaccgttcccggaacgtattaaattcatcgaggaaaaccacgaaaacattatggcgtgcgcaaagagcccgctggaaaacacgtggtgggcagagcaggacagtccattctgcttcttggcgttctgtttcgaatatgcaggtgtccagcaccacggcctgagctataactgcagcctgccgctggcctttgatggttcttgtagcggtattcaacactttagcgccatgctgcgcgatgaggttggtggcagagcagtgaatctgctgccaagcgaaaccgtgcaagatatctatggcattgtggctaagaaggttaatgaaatcctgcaagcagacgcgattaacggcacggacaacgaggttgtcaccgtgaccgatgaaaacaccggtgagatctcggagaaagtgaaactgggcaccaaagccttggctggccaatggctggcatacggcgttactcgctccgtgaccaagcgttcggtgatgacccttgcttacggcagcaaagagtttggtttccgccaacaggttctggaggatactatccaaccggccatcgactctggtaaaggcctgatgttcacgcagccgaatcaggcagcgggctatatggcgaagctgatttgggaatcggttagcgttaccgttgttgcagcggtggaggctatgaactggctgaaatctgcggcgaagctgttagctgcggaggtgaaggacaagaagacgggcgaaatcctgcgtaagcgctgcgcagtgcattgggttacgccggatggttttccggtatggcaggagtacaaaaagcctattcagacccgtctgaacctgatgtttctgggtcaatttcgtctgcagccgacgatcaacaccaataaggactccgagatcgacgcgcacaaacaggagtctggcatcgcacccaatttcgttcactcacaggacggttcccatctgcgtaagaccgtcgtgtgggcacacgagaagtatggcattgagtcgtttgcattgatccacgattcctttggtaccatcccggcggacgctgcgaacctgtttaaagcggttcgcgaaaccatggttgacacctatgaaagttgcgatgttctggcagacttttatgatcagttcgccgaccaactgcatgagtcccagctggataaaatgccggcgttaccggcgaagggcaacttaaatctccgcgacatcctggaatctgatttcgccttcgcgtaa

SEQ ID NO: 255 - DNA, 2652 bp, synthetic construct
  source 1..2652: mol_type = other DNA
atgaatacaattaacatagctaaaaatgatttcagcgatattgaactggctgcgatcccgtttaataccttggcggaccattatggtgagcgtctggcgcgtgagcaacttgctctggagcacgaatcctacgagatgggtgaagcgcgtttccggaagatgttcgagcgccagcttaaggctggcgaggtggcggataacgctgctgcgaagccgttgattacgaccctgctgccgaaaatgattgcgcgtattaacgattggttcgaggaagtgaaagcaaagcgtggtaaacgtccaaccgcattccagtttctgcaagagatcaagccggaggcggtggcatacattacgatcaaaaccactctcgcatgtctcaccagcgcggataatactacggtccaagcggtggccagcgcgattggccgcgcgattgaggacgaagcgcgttttggtcgcattcgtgacctggaagcgaaacattttaagaagaacgttgaagaacaattgaatgtacgcgtgggccacgtttacaagaaagcgttcatgcaagtcgttgaagctgatatgctgagcaaaggcctgttaggtggtgaagcatggagcagctggcataaggaggactcaattcacgtcggcgtgcggtgcattgaaatgctgatcgaatcgaccggtatggttagcctgcatcgccaaaacgccggcgtggtgggtcaagatagcgaaacgattgaactggcgccagagtacgcggaagctatcgctaccagagccggcgcattggcggggatcagcccgatgttccagccgtgtgttgtaccaccgaagccgtggaccggtatcaccggtggaggttactgggcgaatggtagacgtccgttggcgttggttcgtacccatagcaaaaaggctctgatgcgttatgaagacgtttacatgccggaagtgtacaaagccatcaacatcgcgcagaacactgcgtggaaaatcaacaaaaaggtgttagctgtggcgaacgtaattacaaaatggaagcactgcccggttgaggacatcccggctattgaacgtgaagagctgccaatgaaaccagaggacattgacatgaatccggaggcgctgaccgcatggaaacgtgcggcagcagcggtctatcgtaaggataaagccagaaagagccgtcgtatctccctggaattcatgcttgagcaggcgaacaaattcgctaaccacaaagccatctggtttccgtataatatggattggcgtggtcgtgtttacgcggtatcgatgttcaacccgcagggtaatgacatgaccaagggtttgttgaccttggccaaaggtaaaccgattggcaaagaaggttactattggttgaagatccacggtgcgaactgcgcaggggtggataaggtaccgttcccggaacgtattaaattcatcgaggaaaaccacgaaaacattatggcgtgcgcaaagagcccgctggaaaacacgtggtgggcagagcaggacagtccattctgcttcttggcgttctgtttcgaatatgcaggtgtccagcaccacggcctgagctataactgcagcctgccgctggcctttgatggttcttgtagcggtattcaacactttagcgccatgctgcgcgatgaggttggtggcagagcagtgaatctgctgccaagcgaaaccgtgcaagatatctatggcattgtggctaagaaggttaatgaaatcctgcaagcagacgcgattaacggcacggacaacgaggttgtcaccgtgaccgatgaaaacaccggtgagatctcggagaaagtgaaactgggcaccaaagccttggctggccaatggctggcatacggcgttactcgctccgtgaccaagcgttcggtgatgacccttgcttacggcagcaaagagtttggtttccgccaacaggttctggaggatactatccaaccggccatcgactctggtaaaggcctgatgttcacgcagccgaatcaggcagcgggctatatggcgaagctgatttgggaatcggttagcgttaccgttgttgcagcggtggaggctatgaactggctgaaatctgcggcgaagctgttagctgcggaggtgaaggacaagaagacgggcgaaatcctgcgtaagcgctgcgcagtgcattgggttacgccggatggttttccggtatggcaggagtacaaaaagcctattcagacccgtctgaacctgatgtttctgggtcaatttcgtctgcagccgacgatcaacaccaataaggactccgagatcgacgcgcacaaacaggagtctggcatcgcacccaatttcgttcactcacaggacggttcccatctgcgtaagaccgtcgtgtgggcacacgagaagtatggcattgagtcgtttgcattgatccacgattcctttggtaccatcccggcggacgctgcgaacctgtttaaagcggttcgcgaaaccatggttgacacctatgaaagttgcgatgttctggcagacttttatgatcagttcgccgaccaactgcatgagtcccagctggataaaatgccggcgttaccggcgaagggcaacttaaatctccgcgacatcctggaatctgatttcgccttcgcgtaa

SEQ ID NO: 256 - DNA, 2652 bp, synthetic construct
  source 1..2652: mol_type = other DNA
atgaatacaattaacatagctaaaaatgatttcagcgatattgaactggctgcgatcccgtttaataccttggcggaccattatggtgagcgtctggcgcgtgagcaacttgctctggagcacgaatcctacgagatgggtgaagcgcgtttccggaagatgttcgagcgccagcttaaggctggcgaggtggcggataacgctgctgcgaagccgttgattacgaccctgctgccgaaaatgattgcgcgtattaacgattggttcgaggaagtgaaagcaaagcgtggtaaacgtccaaccgcattccagtttctgcaagagatcaagccggaggcggtggcatacattacgatcaaaaccactctcgcatgtctcaccagcgcggataatactacggtccaagcggtggccagcgcgattggccgcgcgattgaggacgaagcgcgttttggtcgcattcgtgacctggaagcgaaacattttaagaagaacgttgaagaacaattgaatccacgcgtgggccacgtttacaagaaagcgttcatgcaagtcgttgaagctgatatgctgagcaaaggcctgttaggtggtgaagcatggagcagctggcataaggaggactcaattcacgtcggcgtgcggtgcattgaaatgctgatcgaatcgaccggtatggttagcctgcatcgccaaaacgccggcgtggtgggtcaagatagcgaaacgattgaactggcgccagagtacgcggaagctatcgctaccagagccggcgcattggcggggatcagcccgatgttccagccgtgtgttgtaccaccgaagccgtggaccggtatcaccggtggaggttactgggcgaatggtagacgtccgttggcgttggttcgtacccatagcaaaaaggctctgatgcgttatgaagacgtttacatgccggaagtgtacaaagccatcaacatcgcgcagaacactgcgtggaaaatcaacaaaaaggtgttagctgtggcgaacgtaattacaaaatggaagcactgcccggttgaggacatcccggctattgaacgtgaagagctgccaatgaaaccagaggacattgacatgaatccggaggcgctgaccgcatggaaacgtgcggcagcagcggtctatcgtaaggataaagccagaaagagccgtcgtatctccctggaattcatgcttgagcaggcgaacaaattcgctaaccacaaagccatctggtttccgtataatatggattggcgtggtcgtgtttacgcggtatcgatgttcaacccgcagggtaatgacatgaccaagggtttgttgaccttggccaaaggtaaaccgattggcaaagaaggttactattggttgaagatccacggtgcgaactgcgcaggggtggataaggtaccgttcccggaacgtattaaattcatcgaggaaaaccacgaaaacattatggcgtgcgcaaagagcccgctggaaaacacgtggtgggcagagcaggacagtccattctgcttcttggcgttctgtttcgaatatgcaggtgtccagcaccacggcctgagctataactgcagcctgccgctggcctttgatggttcttgtagcggtattcaacactttagcgccatgctgcgcgatgaggttggtggcagagcagtgaatctgctgccaagcgaaaccgtgcaagatatctatggcattgtggctaagaaggttaatgaaatcctgcaagcagacgcgattaacggcacggacaacgaggttgtcaccgtgaccgatgaaaacaccggtgagatctcggagaaagtgaaactgggcaccaaagccttggctggccaatggctggcatacggcgttactcgctccgtgaccaagcgttcggtgatgacccttgcttacggcagcaaagagtttggtttccgccaacaggttctggaggatactatccaaccggccatcgactctggtaaaggcctgatgttcacgcagccgaatcaggcagcgggctatatggcgaagctgatttgggaatcggttagcgttaccgttgttgcagcggtggaggctatgaactggctgaaatctgcggcgaagctgttagctgcggaggtgaaggacaagaagacgggcgaaatcctgcgtaagcgctgcgcagtgcattgggttacgccggatggttttccggtatggcaggagtacaaaaagcctattcagacccgtctgaacctgatgtttctgggtcaatttcgtctgcagccgacgatcaacaccaataaggactccgagatcgacgcgcacaaacaggagtctggcatcgcacccaatttcgttcactcacaggacggttcccatctgcgtaagaccgtcgtgtgggcacacgagaagtatggcattgagtcgtttgcattgatccacgattcctttggtaccatcccggcggacgctgcgaacctgtttaaagcggttcgcgaaaccatggttgacacctatgaaagttgcgatgttctggcagacttttatgatcagttcgccgaccaactgcatgagtcccagctggataaaatgccggcgttaccggcgaagggcaacttaaatctccgcgacatcctggaatctgatttcgccttcgcgtaa

SEQ ID NO: 257 - DNA, 2652 bp, synthetic construct
  source 1..2652: mol_type = other DNA
atgaatacaattaacatagctaaaaatgatttcagcgatattgaactggctgcgatcccgtttaataccttggcggaccattatggtgagcgtctggcgcgtgagcaacttgctctggagcacgaatcctacgagatgggtgaagcgcgtttccggaagatgttcgagcgccagcttaaggctggcgaggtggcggataacgctgctgcgaagccgttgattacgaccctgctgccgaaaatgattgcgcgtattaacgattggttcgaggaagtgaaagcaaagcgtggtaaacgtccaaccgcattccagtttctgcaagagatcaagccggaggcggtggcatacattacgatcaaaaccactctcgcatgtctcaccagcgcggataatactacggtccaagcggtggccagcgcgattggccgcgcgattgaggacgaagcgcgttttggtcgcattcgtgacctggaagcgaaacattttaagaagaacgttgaagaacaattgaatacacgcgtgggccacgtttacaagaaagcgttcatgcaagtcgttgaagctgatatgctgagcaaaggcctgttaggtggtgaagcatggagcagctggcataaggaggactcaattcacgtcggcgtgcggtgcattgaaatgctgatcgaatcgaccggtatggttagcctgcatcgccaaaacgccggcgtggtgggtcaagatagcgaaacgattgaactggcgccagagtacgcggaagctatcgctaccagagccggcgcattggcggggatcagcccgatgttccagccgtgtgttgtaccaccgaagccgtggaccggtatcaccggtggaggttactgggcgaatggtagacgtccgttggcgttggttcgtacccatagcaaaaaggctctgatgcgttatgaagacgtttacatgccggaagtgtacaaagccatcaacatcgcgcagaacactgcgtggaaaatcaacaaaaaggtgttagctgtggcgaacgtaattacaaaatggaagcactgcccggttgaggacatcccggctattgaacgtgaagagctgccaatgaaaccagaggacattgacatgaatccggaggcgctgaccgcatggaaacgtgcggcagcagcggtctatcgtaaggataaagccagaaagagccgtcgtatctccctggaattcatgcttgagcaggcgaacaaattcgctaaccacaaagccatctggtttccgtataatatggattggcgtggtcgtgtttacgcggtatcgatgttcaacccgcagggtaatgacatgaccaagggtttgttgaccttggccaaaggtaaaccgattggcaaagaaggttactattggttgaagatccacggtgcgaactgcgcaggggtggataaggtaccgttcccggaacgtattaaattcatcgaggaaaaccacgaaaacattatggcgtgcgcaaagagcccgctggaaaacacgtggtgggcagagcaggacagtccattctgcttcttggcgttctgtttcgaatatgcaggtgtccagcaccacggcctgagctataactgcagcctgccgctggcctttgatggttcttgtagcggtattcaacactttagcgccatgctgcgcgatgaggttggtggcagagcagtgaatctgctgccaagcgaaaccgtgcaagatatctatggcattgtggctaagaaggttaatgaaatcctgcaagcagacgcgattaacggcacggacaacgaggttgtcaccgtgaccgatgaaaacaccggtgagatctcggagaaagtgaaactgggcaccaaagccttggctggccaatggctggcatacggcgttactcgctccgtgaccaagcgttcggtgatgacccttgcttacggcagcaaagagtttggtttccgccaacaggttctggaggatactatccaaccggccatcgactctggtaaaggcctgatgttcacgcagccgaatcaggcagcgggctatatggcgaagctgatttgggaatcggttagcgttaccgttgttgcagcggtggaggctatgaactggctgaaatctgcggcgaagctgttagctgcggaggtgaaggacaagaagacgggcgaaatcctgcgtaagcgctgcgcagtgcattgggttacgccggatggttttccggtatggcaggagtacaaaaagcctattcagacccgtctgaacctgatgtttctgggtcaatttcgtctgcagccgacgatcaacaccaataaggactccgagatcgacgcgcacaaacaggagtctggcatcgcacccaatttcgttcactcacaggacggttcccatctgcgtaagaccgtcgtgtgggcacacgagaagtatggcattgagtcgtttgcattgatccacgattcctttggtaccatcccggcggacgctgcgaacctgtttaaagcggttcgcgaaaccatggttgacacctatgaaagttgcgatgttctggcagacttttatgatcagttcgccgaccaactgcatgagtcccagctggataaaatgccggcgttaccggcgaagggcaacttaaatctccgcgacatcctggaatctgatttcgccttcgcgtaa

SEQ ID NO: 258 - DNA, 2652 bp, synthetic construct
  source 1..2652: mol_type = other DNA
atgaatacaattaacatagctaaaaatgatttcagcgatattgaactggctgcgatcccgtttaataccttggcggaccattatggtgagcgtctggcgcgtgagcaacttgctctggagcacgaatcctacgagatgggtgaagcgcgtttccggaagatgttcgagcgccagcttaaggctggcgaggtggcggataacgctgctgcgaagccgttgattacgaccctgctgccgaaaatgattgcgcgtattaacgattggttcgaggaagtgaaagcaaagcgtggtaaacgtccaaccgcattccagtttctgcaagagatcaagccggaggcggtggcatacattacgatcaaaaccactctcgcatgtctcaccagcgcggataatactacggtccaagcggtggccagcgcgattggccgcgcgattgaggacgaagcgcgttttggtcgcattcgtgacctggaagcgaaacattttaagaagaacgttgaagaacaattgaattgtcgcgtgggccacgtttacaagaaagcgttcatgcaagtcgttgaagctgatatgctgagcaaaggcctgttaggtggtgaagcatggagcagctggcataaggaggactcaattcacgtcggcgtgcggtgcattgaaatgctgatcgaatcgaccggtatggttagcctgcatcgccaaaacgccggcgtggtgggtcaagatagcgaaacgattgaactggcgccagagtacgcggaagctatcgctaccagagccggcgcattggcggggatcagcccgatgttccagccgtgtgttgtaccaccgaagccgtggaccggtatcaccggtggaggttactgggcgaatggtagacgtccgttggcgttggttcgtacccatagcaaaaaggctctgatgcgttatgaagacgtttacatgccggaagtgtacaaagccatcaacatcgcgcagaacactgcgtggaaaatcaacaaaaaggtgttagctgtggcgaacgtaattacaaaatggaagcactgcccggttgaggacatcccggctattgaacgtgaagagctgccaatgaaaccagaggacattgacatgaatccggaggcgctgaccgcatggaaacgtgcggcagcagcggtctatcgtaaggataaagccagaaagagccgtcgtatctccctggaattcatgcttgagcaggcgaacaaattcgctaaccacaaagccatctggtttccgtataatatggattggcgtggtcgtgtttacgcggtatcgatgttcaacccgcagggtaatgacatgaccaagggtttgttgaccttggccaaaggtaaaccgattggcaaagaaggttactattggttgaagatccacggtgcgaactgcgcaggggtggataaggtaccgttcccggaacgtattaaattcatcgaggaaaaccacgaaaacattatggcgtgcgcaaagagcccgctggaaaacacgtggtgggcagagcaggacagtccattctgcttcttggcgttctgtttcgaatatgcaggtgtccagcaccacggcctgagctataactgcagcctgccgctggcctttgatggttcttgtagcggtattcaacactttagcgccatgctgcgcgatgaggttggtggcagagcagtgaatctgctgccaagcgaaaccgtgcaagatatctatggcattgtggctaagaaggttaatgaaatcctgcaagcagacgcgattaacggcacggacaacgaggttgtcaccgtgaccgatgaaaacaccggtgagatctcggagaaagtgaaactgggcaccaaagccttggctggccaatggctggcatacggcgttactcgctccgtgaccaagcgttcggtgatgacccttgcttacggcagcaaagagtttggtttccgccaacaggttctggaggatactatccaaccggccatcgactctggtaaaggcctgatgttcacgcagccgaatcaggcagcgggctatatggcgaagctgatttgggaatcggttagcgttaccgttgttgcagcggtggaggctatgaactggctgaaatctgcggcgaagctgttagctgcggaggtgaaggacaagaagacgggcgaaatcctgcgtaagcgctgcgcagtgcattgggttacgccggatggttttccggtatggcaggagtacaaaaagcctattcagacccgtctgaacctgatgtttctgggtcaatttcgtctgcagccgacgatcaacaccaataaggactccgagatcgacgcgcacaaacaggagtctggcatcgcacccaatttcgttcactcacaggacggttcccatctgcgtaagaccgtcgtgtgggcacacgagaagtatggcattgagtcgtttgcattgatccacgattcctttggtaccatcccggcggacgctgcgaacctgtttaaagcggttcgcgaaaccatggttgacacctatgaaagttgcgatgttctggcagacttttatgatcagttcgccgaccaactgcatgagtcccagctggataaaatgccggcgttaccggcgaagggcaacttaaatctccgcgacatcctggaatctgatttcgccttcgcgtaa

SEQ ID NO: 259 - DNA, 2652 bp, synthetic construct
  source 1..2652: mol_type = other DNA
atgaatacaattaacatagctaaaaatgatttcagcgatattgaactggctgcgatcccgtttaataccttggcggaccattatggtgagcgtctggcgcgtgagcaacttgctctggagcacgaatcctacgagatgggtgaagcgcgtttccggaagatgttcgagcgccagcttaaggctggcgaggtggcggataacgctgctgcgaagccgttgattacgaccctgctgccgaaaatgattgcgcgtattaacgattggttcgaggaagtgaaagcaaagcgtggtaaacgtccaaccgcattccagtttctgcaagagatcaagccggaggcggtggcatacattacgatcaaaaccactctcgcatgtctcaccagcgcggataatactacggtccaagcggtggccagcgcgattggccgcgcgattgaggacgaagcgcgttttggtcgcattcgtgacctggaagcgaaacattttaagaagaacgttgaagaacaattgaataatcgcgtgggccacgtttacaagaaagcgttcatgcaagtcgttgaagctgatatgctgagcaaaggcctgttaggtggtgaagcatggagcagctggcataaggaggactcaattcacgtcggcgtgcggtgcattgaaatgctgatcgaatcgaccggtatggttagcctgcatcgccaaaacgccggcgtggtgggtcaagatagcgaaacgattgaactggcgccagagtacgcggaagctatcgctaccagagccggcgcattggcggggatcagcccgatgttccagccgtgtgttgtaccaccgaagccgtggaccggtatcaccggtggaggttactgggcgaatggtagacgtccgttggcgttggttcgtacccatagcaaaaaggctctgatgcgttatgaagacgtttacatgccggaagtgtacaaagccatcaacatcgcgcagaacactgcgtggaaaatcaacaaaaaggtgttagctgtggcgaacgtaattacaaaatggaagcactgcccggttgaggacatcccggctattgaacgtgaagagctgccaatgaaaccagaggacattgacatgaatccggaggcgctgaccgcatggaaacgtgcggcagcagcggtctatcgtaaggataaagccagaaagagccgtcgtatctccctggaattcatgcttgagcaggcgaacaaattcgctaaccacaaagccatctggtttccgtataatatggattggcgtggtcgtgtttacgcggtatcgatgttcaacccgcagggtaatgacatgaccaagggtttgttgaccttggccaaaggtaaaccgattggcaaagaaggttactattggttgaagatccacggtgcgaactgcgcaggggtggataaggtaccgttcccggaacgtattaaattcatcgaggaaaaccacgaaaacattatggcgtgcgcaaagagcccgctggaaaacacgtggtgggcagagcaggacagtccattctgcttcttggcgttctgtttcgaatatgcaggtgtccagcaccacggcctgagctataactgcagcctgccgctggcctttgatggttcttgtagcggtattcaacactttagcgccatgctgcgcgatgaggttggtggcagagcagtgaatctgctgccaagcgaaaccgtgcaagatatctatggcattgtggctaagaaggttaatgaaatcctgcaagcagacgcgattaacggcacggacaacgaggttgtcaccgtgaccgatgaaaacaccggtgagatctcggagaaagtgaaactgggcaccaaagccttggctggccaatggctggcatacggcgttactcgctccgtgaccaagcgttcggtgatgacccttgcttacggcagcaaagagtttggtttccgccaacaggttctggaggatactatccaaccggccatcgactctggtaaaggcctgatgttcacgcagccgaatcaggcagcgggctatatggcgaagctgatttgggaatcggttagcgttaccgttgttgcagcggtggaggctatgaactggctgaaatctgcggcgaagctgttagctgcggaggtgaaggacaagaagacgggcgaaatcctgcgtaagcgctgcgcagtgcattgggttacgccggatggttttccggtatggcaggagtacaaaaagcctattcagacccgtctgaacctgatgtttctgggtcaatttcgtctgcagccgacgatcaacaccaataaggactccgagatcgacgcgcacaaacaggagtctggcatcgcacccaatttcgttcactcacaggacggttcccatctgcgtaagaccgtcgtgtgggcacacgagaagtatggcattgagtcgtttgcattgatccacgattcctttggtaccatcccggcggacgctgcgaacctgtttaaagcggttcgcgaaaccatggttgacacctatgaaagttgcgatgttctggcagacttttatgatcagttcgccgaccaactgcatgagtcccagctggataaaatgccggcgttaccggcgaagggcaacttaaatctccgcgacatcctggaatctgatttcgccttcgcgtaa

SEQ ID NO: 260 - DNA, 2652 bp, synthetic construct
  source 1..2652: mol_type = other DNA
atgaatacaattaacatagctaaaaatgatttcagcgatattgaactggctgcgatcccgtttaataccttggcggaccattatggtgagcgtctggcgcgtgagcaacttgctctggagcacgaatcctacgagatgggtgaagcgcgtttccggaagatgttcgagcgccagcttaaggctggcgaggtggcggataacgctgctgcgaagccgttgattacgaccctgctgccgaaaatgattgcgcgtattaacgattggttcgaggaagtgaaagcaaagcgtggtaaacgtccaaccgcattccagtttctgcaagagatcaagccggaggcggtggcatacattacgatcaaaaccactctcgcatgtctcaccagcgcggataatactacggtccaagcggtggccagcgcgattggccgcgcgattgaggacgaagcgcgttttggtcgcattcgtgacctggaagcgaaacattttaagaagaacgttgaagaacaattgaatctgcgcgtgggccacgtttacaagaaagcgttcatgcaagtcgttgaagctgatatgctgagcaaaggcctgttaggtggtgaagcatggagcagctggcataaggaggactcaattcacgtcggcgtgcggtgcattgaaatgctgatcgaatcgaccggtatggttagcctgcatcgccaaaacgccggcgtggtgggtcaagatagcgaaacgattgaactggcgccagagtacgcggaagctatcgctaccagagccggcgcattggcggggatcagcccgatgttccagccgtgtgttgtaccaccgaagccgtggaccggtatcaccggtggaggttactgggcgaatggtagacgtccgttggcgttggttcgtacccatagcaaaaaggctctgatgcgttatgaagacgtttacatgccggaagtgtacaaagccatcaacatcgcgcagaacactgcgtggaaaatcaacaaaaaggtgttagctgtggcgaacgtaattacaaaatggaagcactgcccggttgaggacatcccggctattgaacgtgaagagctgccaatgaaaccagaggacattgacatgaatccggaggcgctgaccgcatggaaacgtgcggcagcagcggtctatcgtaaggataaagccagaaagagccgtcgtatctccctggaattcatgcttgagcaggcgaacaaattcgctaaccacaaagccatctggtttccgtataatatggattggcgtggtcgtgtttacgcggtatcgatgttcaacccgcagggtaatgacatgaccaagggtttgttgaccttggccaaaggtaaaccgattggcaaagaaggttactattggttgaagatccacggtgcgaactgcgcaggggtggataaggtaccgttcccggaacgtattaaattcatcgaggaaaaccacgaaaacattatggcgtgcgcaaagagcccgctggaaaacacgtggtgggcagagcaggacagtccattctgcttcttggcgttctgtttcgaatatgcaggtgtccagcaccacggcctgagctataactgcagcctgccgctggcctttgatggttcttgtagcggtattcaacactttagcgccatgctgcgcgatgaggttggtggcagagcagtgaatctgctgccaagcgaaaccgtgcaagatatctatggcattgtggctaagaaggttaatgaaatcctgcaagcagacgcgattaacggcacggacaacgaggttgtcaccgtgaccgatgaaaacaccggtgagatctcggagaaagtgaaactgggcaccaaagccttggctggccaatggctggcatacggcgttactcgctccgtgaccaagcgttcggtgatgacccttgcttacggcagcaaagagtttggtttccgccaacaggttctggaggatactatccaaccggccatcgactctggtaaaggcctgatgttcacgcagccgaatcaggcagcgggctatatggcgaagctgatttgggaatcggttagcgttaccgttgttgcagcggtggaggctatgaactggctgaaatctgcggcgaagctgttagctgcggaggtgaaggacaagaagacgggcgaaatcctgcgtaagcgctgcgcagtgcattgggttacgccggatggttttccggtatggcaggagtacaaaaagcctattcagacccgtctgaacctgatgtttctgggtcaatttcgtctgcagccgacgatcaacaccaataaggactccgagatcgacgcgcacaaacaggagtctggcatcgcacccaatttcgttcactcacaggacggttcccatctgcgtaagaccgtcgtgtgggcacacgagaagtatggcattgagtcgtttgcattgatccacgattcctttggtaccatcccggcggacgctgcgaacctgtttaaagcggttcgcgaaaccatggttgacacctatgaaagttgcgatgttctggcagacttttatgatcagttcgccgaccaactgcatgagtcccagctggataaaatgccggcgttaccggcgaagggcaacttaaatctccgcgacatcctggaatctgatttcgccttcgcgtaa

SEQ ID NO: 261 - DNA, 2652 bp, synthetic construct
  source 1..2652: mol_type = other DNA
atgaatacaattaacatagctaaaaatgatttcagcgatattgaactggctgcgatcccgtttaataccttggcggaccattatggtgagcgtctggcgcgtgagcaacttgctctggagcacgaatcctacgagatgggtgaagcgcgtttccggaagatgttcgagcgccagcttaaggctggcgaggtggcggataacgctgctgcgaagccgttgattacgaccctgctgccgaaaatgattgcgcgtattaacgattggttcgaggaagtgaaagcaaagcgtggtaaacgtccaaccgcattccagtttctgcaagagatcaagccggaggcggtggcatacattacgatcaaaaccactctcgcatgtctcaccagcgcggataatactacggtccaagcggtggccagcgcgattggccgcgcgattgaggacgaagcgcgttttggtcgcattcgtgacctggaagcgaaacattttaagaagaacgttgaagaacaattgaataaacacgtgggccacgtttacaagaaagcgttcatgcaagtcgttgaagctgatatgctgagcaaaggcctgttaggtggtgaagcatggagcagctggcataaggaggactcaattcacgtcggcgtgcggtgcattgaaatgctgatcgaatcgaccggtatggttagcctgcatcgccaaaacgccggcgtggtgggtcaagatagcgaaacgattgaactggcgccagagtacgcggaagctatcgctaccagagccggcgcattggcggggatcagcccgatgttccagccgtgtgttgtaccaccgaagccgtggaccggtatcaccggtggaggttactgggcgaatggtagacgtccgttggcgttggttcgtacccatagcaaaaaggctctgatgcgttatgaagacgtttacatgccggaagtgtacaaagccatcaacatcgcgcagaacactgcgtggaaaatcaacaaaaaggtgttagctgtggcgaacgtaattacaaaatggaagcactgcccggttgaggacatcccggctattgaacgtgaagagctgccaatgaaaccagaggacattgacatgaatccggaggcgctgaccgcatggaaacgtgcggcagcagcggtctatcgtaaggataaagccagaaagagccgtcgtatctccctggaattcatgcttgagcaggcgaacaaattcgctaaccacaaagccatctggtttccgtataatatggattggcgtggtcgtgtttacgcggtatcgatgttcaacccgcagggtaatgacatgaccaagggtttgttgaccttggccaaaggtaaaccgattggcaaagaaggttactattggttgaagatccacggtgcgaactgcgcaggggtggataaggtaccgttcccggaacgtattaaattcatcgaggaaaaccacgaaaacattatggcgtgcgcaaagagcccgctggaaaacacgtggtgggcagagcaggacagtccattctgcttcttggcgttctgtttcgaatatgcaggtgtccagcaccacggcctgagctataactgcagcctgccgctggcctttgatggttcttgtagcggtattcaacactttagcgccatgctgcgcgatgaggttggtggcagagcagtgaatctgctgccaagcgaaaccgtgcaagatatctatggcattgtggctaagaaggttaatgaaatcctgcaagcagacgcgattaacggcacggacaacgaggttgtcaccgtgaccgatgaaaacaccggtgagatctcggagaaagtgaaactgggcaccaaagccttggctggccaatggctggcatacggcgttactcgctccgtgaccaagcgttcggtgatgacccttgcttacggcagcaaagagtttggtttccgccaacaggttctggaggatactatccaaccggccatcgactctggtaaaggcctgatgttcacgcagccgaatcaggcagcgggctatatggcgaagctgatttgggaatcggttagcgttaccgttgttgcagcggtggaggctatgaactggctgaaatctgcggcgaagctgttagctgcggaggtgaaggacaagaagacgggcgaaatcctgcgtaagcgctgcgcagtgcattgggttacgccggatggttttccggtatggcaggagtacaaaaagcctattcagacccgtctgaacctgatgtttctgggtcaatttcgtctgcagccgacgatcaacaccaataaggactccgagatcgacgcgcacaaacaggagtctggcatcgcacccaatttcgttcactcacaggacggttcccatctgcgtaagaccgtcgtgtgggcacacgagaagtatggcattgagtcgtttgcattgatccacgattcctttggtaccatcccggcggacgctgcgaacctgtttaaagcggttcgcgaaaccatggttgacacctatgaaagttgcgatgttctggcagacttttatgatcagttcgccgaccaactgcatgagtcccagctggataaaatgccggcgttaccggcgaagggcaacttaaatctccgcgacatcctggaatctgatttcgccttcgcgtaa

SEQ ID NO: 262 - DNA, 2652 bp, synthetic construct
  source 1..2652: mol_type = other DNA
atgaatacaattaacatagctaaaaatgatttcagcgatattgaactggctgcgatcccgtttaataccttggcggaccattatggtgagcgtctggcgcgtgagcaacttgctctggagcacgaatcctacgagatgggtgaagcgcgtttccggaagatgttcgagcgccagcttaaggctggcgaggtggcggataacgctgctgcgaagccgttgattacgaccctgctgccgaaaatgattgcgcgtattaacgattggttcgaggaagtgaaagcaaagcgtggtaaacgtccaaccgcattccagtttctgcaagagatcaagccggaggcggtggcatacattacgatcaaaaccactctcgcatgtctcaccagcgcggataatactacggtccaagcggtggccagcgcgattggccgcgcgattgaggacgaagcgcgttttggtcgcattcgtgacctggaagcgaaacattttaagaagaacgttgaagaacaattgaataaatacgtgggccacgtttacaagaaagcgttcatgcaagtcgttgaagctgatatgctgagcaaaggcctgttaggtggtgaagcatggagcagctggcataaggaggactcaattcacgtcggcgtgcggtgcattgaaatgctgatcgaatcgaccggtatggttagcctgcatcgccaaaacgccggcgtggtgggtcaagatagcgaaacgattgaactggcgccagagtacgcggaagctatcgctaccagagccggcgcattggcggggatcagcccgatgttccagccgtgtgttgtaccaccgaagccgtggaccggtatcaccggtggaggttactgggcgaatggtagacgtccgttggcgttggttcgtacccatagcaaaaaggctctgatgcgttatgaagacgtttacatgccggaagtgtacaaagccatcaacatcgcgcagaacactgcgtggaaaatcaacaaaaaggtgttagctgtggcgaacgtaattacaaaatggaagcactgcccggttgaggacatcccggctattgaacgtgaagagctgccaatgaaaccagaggacattgacatgaatccggaggcgctgaccgcatggaaacgtgcggcagcagcggtctatcgtaaggataaagccagaaagagccgtcgtatctccctggaattcatgcttgagcaggcgaacaaattcgctaaccacaaagccatctggtttccgtataatatggattggcgtggtcgtgtttacgcggtatcgatgttcaacccgcagggtaatgacatgaccaagggtttgttgaccttggccaaaggtaaaccgattggcaaagaaggttactattggttgaagatccacggtgcgaactgcgcaggggtggataaggtaccgttcccggaacgtattaaattcatcgaggaaaaccacgaaaacattatggcgtgcgcaaagagcccgctggaaaacacgtggtgggcagagcaggacagtccattctgcttcttggcgttctgtttcgaatatgcaggtgtccagcaccacggcctgagctataactgcagcctgccgctggcctttgatggttcttgtagcggtattcaacactttagcgccatgctgcgcgatgaggttggtggcagagcagtgaatctgctgccaagcgaaaccgtgcaagatatctatggcattgtggctaagaaggttaatgaaatcctgcaagcagacgcgattaacggcacggacaacgaggttgtcaccgtgaccgatgaaaacaccggtgagatctcggagaaagtgaaactgggcaccaaagccttggctggccaatggctggcatacggcgttactcgctccgtgaccaagcgttcggtgatgacccttgcttacggcagcaaagagtttggtttccgccaacaggttctggaggatactatccaaccggccatcgactctggtaaaggcctgatgttcacgcagccgaatcaggcagcgggctatatggcgaagctgatttgggaatcggttagcgttaccgttgttgcagcggtggaggctatgaactggctgaaatctgcggcgaagctgttagctgcggaggtgaaggacaagaagacgggcgaaatcctgcgtaagcgctgcgcagtgcattgggttacgccggatggttttccggtatggcaggagtacaaaaagcctattcagacccgtctgaacctgatgtttctgggtcaatttcgtctgcagccgacgatcaacaccaataaggactccgagatcgacgcgcacaaacaggagtctggcatcgcacccaatttcgttcactcacaggacggttcccatctgcgtaagaccgtcgtgtgggcacacgagaagtatggcattgagtcgtttgcattgatccacgattcctttggtaccatcccggcggacgctgcgaacctgtttaaagcggttcgcgaaaccatggttgacacctatgaaagttgcgatgttctggcagacttttatgatcagttcgccgaccaactgcatgagtcccagctggataaaatgccggcgttaccggcgaagggcaacttaaatctccgcgacatcctggaatctgatttcgccttcgcgtaa

SEQ ID NO: 263 - DNA, 2652 bp, synthetic construct
  source 1..2652: mol_type = other DNA
atgaatacaattaacatagctaaaaatgatttcagcgatattgaactggctgcgatcccgtttaataccttggcggaccattatggtgagcgtctggcgcgtgagcaacttgctctggagcacgaatcctacgagatgggtgaagcgcgtttccggaagatgttcgagcgccagcttaaggctggcgaggtggcggataacgctgctgcgaagccgttgattacgaccctgctgccgaaaatgattgcgcgtattaacgattggttcgaggaagtgaaagcaaagcgtggtaaacgtccaaccgcattccagtttctgcaagagatcaagccggaggcggtggcatacattacgatcaaaaccactctcgcatgtctcaccagcgcggataatactacggtccaagcggtggccagcgcgattggccgcgcgattgaggacgaagcgcgttttggtcgcattcgtgacctggaagcgaaacattttaagaagaacgttgaagaacaattgaataaatccgtgggccacgtttacaagaaagcgttcatgcaagtcgttgaagctgatatgctgagcaaaggcctgttaggtggtgaagcatggagcagctggcataaggaggactcaattcacgtcggcgtgcggtgcattgaaatgctgatcgaatcgaccggtatggttagcctgcatcgccaaaacgccggcgtggtgggtcaagatagcgaaacgattgaactggcgccagagtacgcggaagctatcgctaccagagccggcgcattggcggggatcagcccgatgttccagccgtgtgttgtaccaccgaagccgtggaccggtatcaccggtggaggttactgggcgaatggtagacgtccgttggcgttggttcgtacccatagcaaaaaggctctgatgcgttatgaagacgtttacatgccggaagtgtacaaagccatcaacatcgcgcagaacactgcgtggaaaatcaacaaaaaggtgttagctgtggcgaacgtaattacaaaatggaagcactgcccggttgaggacatcccggctattgaacgtgaagagctgccaatgaaaccagaggacattgacatgaatccggaggcgctgaccgcatggaaacgtgcggcagcagcggtctatcgtaaggataaagccagaaagagccgtcgtatctccctggaattcatgcttgagcaggcgaacaaattcgctaaccacaaagccatctggtttccgtataatatggattggcgtggtcgtgtttacgcggtatcgatgttcaacccgcagggtaatgacatgaccaagggtttgttgaccttggccaaaggtaaaccgattggcaaagaaggttactattggttgaagatccacggtgcgaactgcgcaggggtggataaggtaccgttcccggaacgtattaaattcatcgaggaaaaccacgaaaacattatggcgtgcgcaaagagcccgctggaaaacacgtggtgggcagagcaggacagtccattctgcttcttggcgttctgtttcgaatatgcaggtgtccagcaccacggcctgagctataactgcagcctgccgctggcctttgatggttcttgtagcggtattcaacactttagcgccatgctgcgcgatgaggttggtggcagagcagtgaatctgctgccaagcgaaaccgtgcaagatatctatggcattgtggctaagaaggttaatgaaatcctgcaagcagacgcgattaacggcacggacaacgaggttgtcaccgtgaccgatgaaaacaccggtgagatctcggagaaagtgaaactgggcaccaaagccttggctggccaatggctggcatacggcgttactcgctccgtgaccaagcgttcggtgatgacccttgcttacggcagcaaagagtttggtttccgccaacaggttctggaggatactatccaaccggccatcgactctggtaaaggcctgatgttcacgcagccgaatcaggcagcgggctatatggcgaagctgatttgggaatcggttagcgttaccgttgttgcagcggtggaggctatgaactggctgaaatctgcggcgaagctgttagctgcggaggtgaaggacaagaagacgggcgaaatcctgcgtaagcgctgcgcagtgcattgggttacgccggatggttttccggtatggcaggagtacaaaaagcctattcagacccgtctgaacctgatgtttctgggtcaatttcgtctgcagccgacgatcaacaccaataaggactccgagatcgacgcgcacaaacaggagtctggcatcgcacccaatttcgttcactcacaggacggttcccatctgcgtaagaccgtcgtgtgggcacacgagaagtatggcattgagtcgtttgcattgatccacgattcctttggtaccatcccggcggacgctgcgaacctgtttaaagcggttcgcgaaaccatggttgacacctatgaaagttgcgatgttctggcagacttttatgatcagttcgccgaccaactgcatgagtcccagctggataaaatgccggcgttaccggcgaagggcaacttaaatctccgcgacatcctggaatctgatttcgccttcgcgtaa

SEQ ID NO: 264 - DNA, 2652 bp, synthetic construct
  source 1..2652: mol_type = other DNA
atgaatacaattaacatagctaaaaatgatttcagcgatattgaactggctgcgatcccgtttaataccttggcggaccattatggtgagcgtctggcgcgtgagcaacttgctctggagcacgaatcctacgagatgggtgaagcgcgtttccggaagatgttcgagcgccagcttaaggctggcgaggtggcggataacgctgctgcgaagccgttgattacgaccctgctgccgaaaatgattgcgcgtattaacgattggttcgaggaagtgaaagcaaagcgtggtaaacgtccaaccgcattccagtttctgcaagagatcaagccggaggcggtggcatacattacgatcaaaaccactctcgcatgtctcaccagcgcggataatactacggtccaagcggtggccagcgcgattggccgcgcgattgaggacgaagcgcgttttggtcgcattcgtgacctggaagcgaaacattttaagaagaacgttgaagaacaattgaataaatgggtgggccacgtttacaagaaagcgttcatgcaagtcgttgaagctgatatgctgagcaaaggcctgttaggtggtgaagcatggagcagctggcataaggaggactcaattcacgtcggcgtgcggtgcattgaaatgctgatcgaatcgaccggtatggttagcctgcatcgccaaaacgccggcgtggtgggtcaagatagcgaaacgattgaactggcgccagagtacgcggaagctatcgctaccagagccggcgcattggcggggatcagcccgatgttccagccgtgtgttgtaccaccgaagccgtggaccggtatcaccggtggaggttactgggcgaatggtagacgtccgttggcgttggttcgtacccatagcaaaaaggctctgatgcgttatgaagacgtttacatgccggaagtgtacaaagccatcaacatcgcgcagaacactgcgtggaaaatcaacaaaaaggtgttagctgtggcgaacgtaattacaaaatggaagcactgcccggttgaggacatcccggctattgaacgtgaagagctgccaatgaaaccagaggacattgacatgaatccggaggcgctgaccgcatggaaacgtgcggcagcagcggtctatcgtaaggataaagccagaaagagccgtcgtatctccctggaattcatgcttgagcaggcgaacaaattcgctaaccacaaagccatctggtttccgtataatatggattggcgtggtcgtgtttacgcggtatcgatgttcaacccgcagggtaatgacatgaccaagggtttgttgaccttggccaaaggtaaaccgattggcaaagaaggttactattggttgaagatccacggtgcgaactgcgcaggggtggataaggtaccgttcccggaacgtattaaattcatcgaggaaaaccacgaaaacattatggcgtgcgcaaagagcccgctggaaaacacgtggtgggcagagcaggacagtccattctgcttcttggcgttctgtttcgaatatgcaggtgtccagcaccacggcctgagctataactgcagcctgccgctggcctttgatggttcttgtagcggtattcaacactttagcgccatgctgcgcgatgaggttggtggcagagcagtgaatctgctgccaagcgaaaccgtgcaagatatctatggcattgtggctaagaaggttaatgaaatcctgcaagcagacgcgattaacggcacggacaacgaggttgtcaccgtgaccgatgaaaacaccggtgagatctcggagaaagtgaaactgggcaccaaagccttggctggccaatggctggcatacggcgttactcgctccgtgaccaagcgttcggtgatgacccttgcttacggcagcaaagagtttggtttccgccaacaggttctggaggatactatccaaccggccatcgactctggtaaaggcctgatgttcacgcagccgaatcaggcagcgggctatatggcgaagctgatttgggaatcggttagcgttaccgttgttgcagcggtggaggctatgaactggctgaaatctgcggcgaagctgttagctgcggaggtgaaggacaagaagacgggcgaaatcctgcgtaagcgctgcgcagtgcattgggttacgccggatggttttccggtatggcaggagtacaaaaagcctattcagacccgtctgaacctgatgtttctgggtcaatttcgtctgcagccgacgatcaacaccaataaggactccgagatcgacgcgcacaaacaggagtctggcatcgcacccaatttcgttcactcacaggacggttcccatctgcgtaagaccgtcgtgtgggcacacgagaagtatggcattgagtcgtttgcattgatccacgattcctttggtaccatcccggcggacgctgcgaacctgtttaaagcggttcgcgaaaccatggttgacacctatgaaagttgcgatgttctggcagacttttatgatcagttcgccgaccaactgcatgagtcccagctggataaaatgccggcgttaccggcgaagggcaacttaaatctccgcgacatcctggaatctgatttcgccttcgcgtaa

SEQ ID NO: 265 - DNA, 2652 bp, synthetic construct
  source 1..2652: mol_type = other DNA
atgaatacaattaacatagctaaaaatgatttcagcgatattgaactggctgcgatcccgtttaataccttggcggaccattatggtgagcgtctggcgcgtgagcaacttgctctggagcacgaatcctacgagatgggtgaagcgcgtttccggaagatgttcgagcgccagcttaaggctggcgaggtggcggataacgctgctgcgaagccgttgattacgaccctgctgccgaaaatgattgcgcgtattaacgattggttcgaggaagtgaaagcaaagcgtggtaaacgtccaaccgcattccagtttctgcaagagatcaagccggaggcggtggcatacattacgatcaaaaccactctcgcatgtctcaccagcgcggataatactacggtccaagcggtggccagcgcgattggccgcgcgattgaggacgaagcgcgttttggtcgcattcgtgacctggaagcgaaacattttaagaagaacgttgaagaacaattgaataaacccgtgggccacgtttacaagaaagcgttcatgcaagtcgttgaagctgatatgctgagcaaaggcctgttaggtggtgaagcatggagcagctggcataaggaggactcaattcacgtcggcgtgcggtgcattgaaatgctgatcgaatcgaccggtatggttagcctgcatcgccaaaacgccggcgtggtgggtcaagatagcgaaacgattgaactggcgccagagtacgcggaagctatcgctaccagagccggcgcattggcggggatcagcccgatgttccagccgtgtgttgtaccaccgaagccgtggaccggtatcaccggtggaggttactgggcgaatggtagacgtccgttggcgttggttcgtacccatagcaaaaaggctctgatgcgttatgaagacgtttacatgccggaagtgtacaaagccatcaacatcgcgcagaacactgcgtggaaaatcaacaaaaaggtgttagctgtggcgaacgtaattacaaaatggaagcactgcccggttgaggacatcccggctattgaacgtgaagagctgccaatgaaaccagaggacattgacatgaatccggaggcgctgaccgcatggaaacgtgcggcagcagcggtctatcgtaaggataaagccagaaagagccgtcgtatctccctggaattcatgcttgagcaggcgaacaaattcgctaaccacaaagccatctggtttccgtataatatggattggcgtggtcgtgtttacgcggtatcgatgttcaacccgcagggtaatgacatgaccaagggtttgttgaccttggccaaaggtaaaccgattggcaaagaaggttactattggttgaagatccacggtgcgaactgcgcaggggtggataaggtaccgttcccggaacgtattaaattcatcgaggaaaaccacgaaaacattatggcgtgcgcaaagagcccgctggaaaacacgtggtgggcagagcaggacagtccattctgcttcttggcgttctgtttcgaatatgcaggtgtccagcaccacggcctgagctataactgcagcctgccgctggcctttgatggttcttgtagcggtattcaacactttagcgccatgctgcgcgatgaggttggtggcagagcagtgaatctgctgccaagcgaaaccgtgcaagatatctatggcattgtggctaagaaggttaatgaaatcctgcaagcagacgcgattaacggcacggacaacgaggttgtcaccgtgaccgatgaaaacaccggtgagatctcggagaaagtgaaactgggcaccaaagccttggctggccaatggctggcatacggcgttactcgctccgtgaccaagcgttcggtgatgacccttgcttacggcagcaaagagtttggtttccgccaacaggttctggaggatactatccaaccggccatcgactctggtaaaggcctgatgttcacgcagccgaatcaggcagcgggctatatggcgaagctgatttgggaatcggttagcgttaccgttgttgcagcggtggaggctatgaactggctgaaatctgcggcgaagctgttagctgcggaggtgaaggacaagaagacgggcgaaatcctgcgtaagcgctgcgcagtgcattgggttacgccggatggttttccggtatggcaggagtacaaaaagcctattcagacccgtctgaacctgatgtttctgggtcaatttcgtctgcagccgacgatcaacaccaataaggactccgagatcgacgcgcacaaacaggagtctggcatcgcacccaatttcgttcactcacaggacggttcccatctgcgtaagaccgtcgtgtgggcacacgagaagtatggcattgagtcgtttgcattgatccacgattcctttggtaccatcccggcggacgctgcgaacctgtttaaagcggttcgcgaaaccatggttgacacctatgaaagttgcgatgttctggcagacttttatgatcagttcgccgaccaactgcatgagtcccagctggataaaatgccggcgttaccggcgaagggcaacttaaatctccgcgacatcctggaatctgatttcgccttcgcgtaa

SEQ ID NO: 266 - DNA, 2652 bp, synthetic construct
  source 1..2652: mol_type = other DNA
atgaatacaattaacatagctaaaaatgatttcagcgatattgaactggctgcgatcccgtttaataccttggcggaccattatggtgagcgtctggcgcgtgagcaacttgctctggagcacgaatcctacgagatgggtgaagcgcgtttccggaagatgttcgagcgccagcttaaggctggcgaggtggcggataacgctgctgcgaagccgttgattacgaccctgctgccgaaaatgattgcgcgtattaacgattggttcgaggaagtgaaagcaaagcgtggtaaacgtccaaccgcattccagtttctgcaagagatcaagccggaggcggtggcatacattacgatcaaaaccactctcgcatgtctcaccagcgcggataatactacggtccaagcggtggccagcgcgattggccgcgcgattgaggacgaagcgcgttttggtcgcattcgtgacctggaagcgaaacattttaagaagaacgttgaagaacaattgaataaaaacgtgggccacgtttacaagaaagcgttcatgcaagtcgttgaagctgatatgctgagcaaaggcctgttaggtggtgaagcatggagcagctggcataaggaggactcaattcacgtcggcgtgcggtgcattgaaatgctgatcgaatcgaccggtatggttagcctgcatcgccaaaacgccggcgtggtgggtcaagatagcgaaacgattgaactggcgccagagtacgcggaagctatcgctaccagagccggcgcattggcggggatcagcccgatgttccagccgtgtgttgtaccaccgaagccgtggaccggtatcaccggtggaggttactgggcgaatggtagacgtccgttggcgttggttcgtacccatagcaaaaaggctctgatgcgttatgaagacgtttacatgccggaagtgtacaaagccatcaacatcgcgcagaacactgcgtggaaaatcaacaaaaaggtgttagctgtggcgaacgtaattacaaaatggaagcactgcccggttgaggacatcccggctattgaacgtgaagagctgccaatgaaaccagaggacattgacatgaatccggaggcgctgaccgcatggaaacgtgcggcagcagcggtctatcgtaaggataaagccagaaagagccgtcgtatctccctggaattcatgcttgagcaggcgaacaaattcgctaaccacaaagccatctggtttccgtataatatggattggcgtggtcgtgtttacgcggtatcgatgttcaacccgcagggtaatgacatgaccaagggtttgttgaccttggccaaaggtaaaccgattggcaaagaaggttactattggttgaagatccacggtgcgaactgcgcaggggtggataaggtaccgttcccggaacgtattaaattcatcgaggaaaaccacgaaaacattatggcgtgcgcaaagagcccgctggaaaacacgtggtgggcagagcaggacagtccattctgcttcttggcgttctgtttcgaatatgcaggtgtccagcaccacggcctgagctataactgcagcctgccgctggcctttgatggttcttgtagcggtattcaacactttagcgccatgctgcgcgatgaggttggtggcagagcagtgaatctgctgccaagcgaaaccgtgcaagatatctatggcattgtggctaagaaggttaatgaaatcctgcaagcagacgcgattaacggcacggacaacgaggttgtcaccgtgaccgatgaaaacaccggtgagatctcggagaaagtgaaactgggcaccaaagccttggctggccaatggctggcatacggcgttactcgctccgtgaccaagcgttcggtgatgacccttgcttacggcagcaaagagtttggtttccgccaacaggttctggaggatactatccaaccggccatcgactctggtaaaggcctgatgttcacgcagccgaatcaggcagcgggctatatggcgaagctgatttgggaatcggttagcgttaccgttgttgcagcggtggaggctatgaactggctgaaatctgcggcgaagctgttagctgcggaggtgaaggacaagaagacgggcgaaatcctgcgtaagcgctgcgcagtgcattgggttacgccggatggttttccggtatggcaggagtacaaaaagcctattcagacccgtctgaacctgatgtttctgggtcaatttcgtctgcagccgacgatcaacaccaataaggactccgagatcgacgcgcacaaacaggagtctggcatcgcacccaatttcgttcactcacaggacggttcccatctgcgtaagaccgtcgtgtgggcacacgagaagtatggcattgagtcgtttgcattgatccacgattcctttggtaccatcccggcggacgctgcgaacctgtttaaagcggttcgcgaaaccatggttgacacctatgaaagttgcgatgttctggcagacttttatgatcagttcgccgaccaactgcatgagtcccagctggataaaatgccggcgttaccggcgaagggcaacttaaatctccgcgacatcctggaatctgatttcgccttcgcgtaa

SEQ ID NO: 267 - DNA, 2652 bp, synthetic construct
  source 1..2652: mol_type = other DNA
atgaatacaattaacatagctaaaaatgatttcagcgatattgaactggctgcgatcccgtttaataccttggcggaccattatggtgagcgtctggcgcgtgagcaacttgctctggagcacgaatcctacgagatgggtgaagcgcgtttccggaagatgttcgagcgccagcttaaggctggcgaggtggcggataacgctgctgcgaagccgttgattacgaccctgctgccgaaaatgattgcgcgtattaacgattggttcgaggaagtgaaagcaaagcgtggtaaacgtccaaccgcattccagtttctgcaagagatcaagccggaggcggtggcatacattacgatcaaaaccactctcgcatgtctcaccagcgcggataatactacggtccaagcggtggccagcgcgattggccgcgcgattgaggacgaagcgcgttttggtcgcattcgtgacctggaagcgaaacattttaagaagaacgttgaagaacaattgaataaacaagtgggccacgtttacaagaaagcgttcatgcaagtcgttgaagctgatatgctgagcaaaggcctgttaggtggtgaagcatggagcagctggcataaggaggactcaattcacgtcggcgtgcggtgcattgaaatgctgatcgaatcgaccggtatggttagcctgcatcgccaaaacgccggcgtggtgggtcaagatagcgaaacgattgaactggcgccagagtacgcggaagctatcgctaccagagccggcgcattggcggggatcagcccgatgttccagccgtgtgttgtaccaccgaagccgtggaccggtatcaccggtggaggttactgggcgaatggtagacgtccgttggcgttggttcgtacccatagcaaaaaggctctgatgcgttatgaagacgtttacatgccggaagtgtacaaagccatcaacatcgcgcagaacactgcgtggaaaatcaacaaaaaggtgttagctgtggcgaacgtaattacaaaatggaagcactgcccggttgaggacatcccggctattgaacgtgaagagctgccaatgaaaccagaggacattgacatgaatccggaggcgctgaccgcatggaaacgtgcggcagcagcggtctatcgtaaggataaagccagaaagagccgtcgtatctccctggaattcatgcttgagcaggcgaacaaattcgctaaccacaaagccatctggtttccgtataatatggattggcgtggtcgtgtttacgcggtatcgatgttcaacccgcagggtaatgacatgaccaagggtttgttgaccttggccaaaggtaaaccgattggcaaagaaggttactattggttgaagatccacggtgcgaactgcgcaggggtggataaggtaccgttcccggaacgtattaaattcatcgaggaaaaccacgaaaacattatggcgtgcgcaaagagcccgctggaaaacacgtggtgggcagagcaggacagtccattctgcttcttggcgttctgtttcgaatatgcaggtgtccagcaccacggcctgagctataactgcagcctgccgctggcctttgatggttcttgtagcggtattcaacactttagcgccatgctgcgcgatgaggttggtggcagagcagtgaatctgctgccaagcgaaaccgtgcaagatatctatggcattgtggctaagaaggttaatgaaatcctgcaagcagacgcgattaacggcacggacaacgaggttgtcaccgtgaccgatgaaaacaccggtgagatctcggagaaagtgaaactgggcaccaaagccttggctggccaatggctggcatacggcgttactcgctccgtgaccaagcgttcggtgatgacccttgcttacggcagcaaagagtttggtttccgccaacaggttctggaggatactatccaaccggccatcgactctggtaaaggcctgatgttcacgcagccgaatcaggcagcgggctatatggcgaagctgatttgggaatcggttagcgttaccgttgttgcagcggtggaggctatgaactggctgaaatctgcggcgaagctgttagctgcggaggtgaaggacaagaagacgggcgaaatcctgcgtaagcgctgcgcagtgcattgggttacgccggatggttttccggtatggcaggagtacaaaaagcctattcagacccgtctgaacctgatgtttctgggtcaatttcgtctgcagccgacgatcaacaccaataaggactccgagatcgacgcgcacaaacaggagtctggcatcgcacccaatttcgttcactcacaggacggttcccatctgcgtaagaccgtcgtgtgggcacacgagaagtatggcattgagtcgtttgcattgatccacgattcctttggtaccatcccggcggacgctgcgaacctgtttaaagcggttcgcgaaaccatggttgacacctatgaaagttgcgatgttctggcagacttttatgatcagttcgccgaccaactgcatgagtcccagctggataaaatgccggcgttaccggcgaagggcaacttaaatctccgcgacatcctggaatctgatttcgccttcgcgtaa

SEQ ID NO: 268 - DNA, 2652 bp, synthetic construct
  source 1..2652: mol_type = other DNA
atgaatacaattaacatagctaaaaatgatttcagcgatattgaactggctgcgatcccgtttaataccttggcggaccattatggtgagcgtctggcgcgtgagcaacttgctctggagcacgaatcctacgagatgggtgaagcgcgtttccggaagatgttcgagcgccagcttaaggctggcgaggtggcggataacgctgctgcgaagccgttgattacgaccctgctgccgaaaatgattgcgcgtattaacgattggttcgaggaagtgaaagcaaagcgtggtaaacgtccaaccgcattccagtttctgcaagagatcaagccggaggcggtggcatacattacgatcaaaaccactctcgcatgtctcaccagcgcggataatactacggtccaagcggtggccagcgcgattggccgcgcgattgaggacgaagcgcgttttggtcgcattcgtgacctggaagcgaaacattttaagaagaacgttgaagaacaattgaatgcagctgtgggccacgtttacaagaaagcgttcatgcaagtcgttgaagctgatatgctgagcaaaggcctgttaggtggtgaagcatggagcagctggcataaggaggactcaattcacgtcggcgtgcggtgcattgaaatgctgatcgaatcgaccggtatggttagcctgcatcgccaaaacgccggcgtggtgggtcaagatagcgaaacgattgaactggcgccagagtacgcggaagctatcgctaccagagccggcgcattggcggggatcagcccgatgttccagccgtgtgttgtaccaccgaagccgtggaccggtatcaccggtggaggttactgggcgaatggtagacgtccgttggcgttggttcgtacccatagcaaaaaggctctgatgcgttatgaagacgtttacatgccggaagtgtacaaagccatcaacatcgcgcagaacactgcgtggaaaatcaacaaaaaggtgttagctgtggcgaacgtaattacaaaatggaagcactgcccggttgaggacatcccggctattgaacgtgaagagctgccaatgaaaccagaggacattgacatgaatccggaggcgctgaccgcatggaaacgtgcggcagcagcggtctatcgttacgataaagccagaaagagccgtcgtatctccctggaattcatgcttgagcaggcgaacaaattcgctaaccacaaagccatctggtttccgtataatatggattggcgtggtcgtgtttacgcggtatcgatgttcaacccgcagggtaatgacatgaccaagggtttgttgaccttggccaaaggtaaaccgattggcaaagaaggttactattggttgaagatccacggtgcgaactgcgcaggggtggataaggtaccgttcccggaacgtattaaattcatcgaggaaaaccacgaaaacattatggcgtgcgcaaagagcccgctggaaaacacgtggtgggcagagcaggacagtccattctgcttcttggcgttctgtttcgaatatgcaggtgtccagcaccacggcctgagctataactgcagcctgccgctggcctttgatggttcttgtagcggtattcaacactttagcgccatgctgcgcgatgaggttggtggcagagcagtgaatctgctgccaagcgaaaccgtgcaagatatctatggcattgtggctaagaaggttaatgaaatcctgcaagcagacgcgattaacggcacggacaacgaggttgtcaccgtgaccgatgaaaacaccggtgagatctcggagaaagtgaaactgggcaccaaagccttggctggccaatggctggcatacggcgttactcgctccgtgaccaagcgttcggtgatgacccttgcttacggcagcaaagagtttggtttccgccaacaggttctggaggatactatccaaccggccatcgactctggtaaaggcctgatgttcacgcagccgaatcaggcagcgggctatatggcgaagctgatttgggaatcggttagcgttaccgttgttgcagcggtggaggctatgaactggctgaaatctgcggcgaagctgttagctgcggaggtgaaggacaagaagacgggcgaaatcctgcgtaagcgctgcgcagtgcattgggttacgccggatggttttccggtatggcaggagtacaaaaagcctattcagacccgtctgaacctgatgtttctgggtcaatttcgtctgcagccgacgatcaacaccaataaggactccgagatcgacgcgcacaaacaggagtctggcatcgcacccaatttcgttcactcacaggacggttcccatctgcgtaagaccgtcgtgtgggcacacgagaagtatggcattgagtcgtttgcattgatccacgattcctttggtaccatcccggcggacgctgcgaacctgtttaaagcggttcgcgaaaccatggttgacacctatgaaagttgcgatgttctggcagacttttatgatcagttcgccgaccaactgcatgagtcccagctggataaaatgccggcgttaccggcgaagggcaacttaaatctccgcgacatcctggaatctgatttcgccttcgcgtaa

SEQ ID NO: 269 - DNA, 2652 bp, synthetic construct
  source 1..2652: mol_type = other DNA
atgaatacaattaacatagctaaaaatgatttcagcgatattgaactggctgcgatcccgtttaataccttggcggaccattatggtgagcgtctggcgcgtgagcaacttgctctggagcacgaatcctacgagatgggtgaagcgcgtttccggaagatgttcgagcgccagcttaaggctggcgaggtggcggataacgctgctgcgaagccgttgattacgaccctgctgccgaaaatgattgcgcgtattaacgattggttcgaggaagtgaaagcaaagcgtggtaaacgtccaaccgcattccagtttctgcaagagatcaagccggaggcggtggcatacattacgatcaaaaccactctcgcatgtctcaccagcgcggataatactacggtccaagcggtggccagcgcgattggccgcgcgattgaggacgaagcgcgttttggtcgcattcgtgacctggaagcgaaacattttaagaagaacgttgaagaacaattgaatgcaggtgtgggccacgtttacaagaaagcgttcatgcaagtcgttgaagctgatatgctgagcaaaggcctgttaggtggtgaagcatggagcagctggcataaggaggactcaattcacgtcggcgtgcggtgcattgaaatgctgatcgaatcgaccggtatggttagcctgcatcgccaaaacgccggcgtggtgggtcaagatagcgaaacgattgaactggcgccagagtacgcggaagctatcgctaccagagccggcgcattggcggggatcagcccgatgttccagccgtgtgttgtaccaccgaagccgtggaccggtatcaccggtggaggttactgggcgaatggtagacgtccgttggcgttggttcgtacccatagcaaaaaggctctgatgcgttatgaagacgtttacatgccggaagtgtacaaagccatcaacatcgcgcagaacactgcgtggaaaatcaacaaaaaggtgttagctgtggcgaacgtaattacaaaatggaagcactgcccggttgaggacatcccggctattgaacgtgaagagctgccaatgaaaccagaggacattgacatgaatccggaggcgctgaccgcatggaaacgtgcggcagcagcggtctatcgttacgataaagccagaaagagccgtcgtatctccctggaattcatgcttgagcaggcgaacaaattcgctaaccacaaagccatctggtttccgtataatatggattggcgtggtcgtgtttacgcggtatcgatgttcaacccgcagggtaatgacatgaccaagggtttgttgaccttggccaaaggtaaaccgattggcaaagaaggttactattggttgaagatccacggtgcgaactgcgcaggggtggataaggtaccgttcccggaacgtattaaattcatcgaggaaaaccacgaaaacattatggcgtgcgcaaagagcccgctggaaaacacgtggtgggcagagcaggacagtccattctgcttcttggcgttctgtttcgaatatgcaggtgtccagcaccacggcctgagctataactgcagcctgccgctggcctttgatggttcttgtagcggtattcaacactttagcgccatgctgcgcgatgaggttggtggcagagcagtgaatctgctgccaagcgaaaccgtgcaagatatctatggcattgtggctaagaaggttaatgaaatcctgcaagcagacgcgattaacggcacggacaacgaggttgtcaccgtgaccgatgaaaacaccggtgagatctcggagaaagtgaaactgggcaccaaagccttggctggccaatggctggcatacggcgttactcgctccgtgaccaagcgttcggtgatgacccttgcttacggcagcaaagagtttggtttccgccaacaggttctggaggatactatccaaccggccatcgactctggtaaaggcctgatgttcacgcagccgaatcaggcagcgggctatatggcgaagctgatttgggaatcggttagcgttaccgttgttgcagcggtggaggctatgaactggctgaaatctgcggcgaagctgttagctgcggaggtgaaggacaagaagacgggcgaaatcctgcgtaagcgctgcgcagtgcattgggttacgccggatggttttccggtatggcaggagtacaaaaagcctattcagacccgtctgaacctgatgtttctgggtcaatttcgtctgcagccgacgatcaacaccaataaggactccgagatcgacgcgcacaaacaggagtctggcatcgcacccaatttcgttcactcacaggacggttcccatctgcgtaagaccgtcgtgtgggcacacgagaagtatggcattgagtcgtttgcattgatccacgattcctttggtaccatcccggcggacgctgcgaacctgtttaaagcggttcgcgaaaccatggttgacacctatgaaagttgcgatgttctggcagacttttatgatcagttcgccgaccaactgcatgagtcccagctggataaaatgccggcgttaccggcgaagggcaacttaaatctccgcgacatcctggaatctgatttcgccttcgcgtaa

SEQ ID NO: 270 - DNA, 2649 bp, synthetic construct
  source 1..2649: mol_type = other DNA
atgaatacaattaacatagctaaaaatgatttcagcgatattgaactggctgcgatcccgtttaataccttggcggaccattatggtgagcgtctggcgcgtgagcaacttgctctggagcacgaatcctacgagatgggtgaagcgcgtttccggaagatgttcgagcgccagcttaaggctggcgaggtggcggataacgctgctgcgaagccgttgattacgaccctgctgccgaaaatgattgcgcgtattaacgattggttcgaggaagtgaaagcaaagcgtggtaaacgtccaaccgcattccagtttctgcaagagatcaagccggaggcggtggcatacattacgatcaaaaccactctcgcatgtctcaccagcgcggataatactacggtccaagcggtggccagcgcgattggccgcgcgattgaggacgaagcgcgttttggtcgcattcgtgacctggaagcgaaacattttaagaagaacgttgaagaacaattgaatgcagtgggccacgtttacaagaaagcgttcatgcaagtcgttgaagctgatatgctgagcaaaggcctgttaggtggtgaagcatggagcagctggcataaggaggactcaattcacgtcggcgtgcggtgcattgaaatgctgatcgaatcgaccggtatggttagcctgcatcgccaaaacgccggcgtggtgggtcaagatagcgaaacgattgaactggcgccagagtacgcggaagctatcgctaccagagccggcgcattggcggggatcagcccgatgttccagccgtgtgttgtaccaccgaagccgtggaccggtatcaccggtggaggttactgggcgaatggtagacgtccgttggcgttggttcgtacccatagcaaaaaggctctgatgcgttatgaagacgtttacatgccggaagtgtacaaagccatcaacatcgcgcagaacactgcgtggaaaatcaacaaaaaggtgttagctgtggcgaacgtaattacaaaatggaagcactgcccggttgaggacatcccggctattgaacgtgaagagctgccaatgaaaccagaggacattgacatgaatccggaggcgctgaccgcatggaaacgtgcggcagcagcggtctatcgttacgataaagccagaaagagccgtcgtatctccctggaattcatgcttgagcaggcgaacaaattcgctaaccacaaagccatctggtttccgtataatatggattggcgtggtcgtgtttacgcggtatcgatgttcaacccgcagggtaatgacatgaccaagggtttgttgaccttggccaaaggtaaaccgattggcaaagaaggttactattggttgaagatccacggtgcgaactgcgcaggggtggataaggtaccgttcccggaacgtattaaattcatcgaggaaaaccacgaaaacattatggcgtgcgcaaagagcccgctggaaaacacgtggtgggcagagcaggacagtccattctgcttcttggcgttctgtttcgaatatgcaggtgtccagcaccacggcctgagctataactgcagcctgccgctggcctttgatggttcttgtagcggtattcaacactttagcgccatgctgcgcgatgaggttggtggcagagcagtgaatctgctgccaagcgaaaccgtgcaagatatctatggcattgtggctaagaaggttaatgaaatcctgcaagcagacgcgattaacggcacggacaacgaggttgtcaccgtgaccgatgaaaacaccggtgagatctcggagaaagtgaaactgggcaccaaagccttggctggccaatggctggcatacggcgttactcgctccgtgaccaagcgttcggtgatgacccttgcttacggcagcaaagagtttggtttccgccaacaggttctggaggatactatccaaccggccatcgactctggtaaaggcctgatgttcacgcagccgaatcaggcagcgggctatatggcgaagctgatttgggaatcggttagcgttaccgttgttgcagcggtggaggctatgaactggctgaaatctgcggcgaagctgttagctgcggaggtgaaggacaagaagacgggcgaaatcctgcgtaagcgctgcgcagtgcattgggttacgccggatggttttccggtatggcaggagtacaaaaagcctattcagacccgtctgaacctgatgtttctgggtcaatttcgtctgcagccgacgatcaacaccaataaggactccgagatcgacgcgcacaaacaggagtctggcatcgcacccaatttcgttcactcacaggacggttcccatctgcgtaagaccgtcgtgtgggcacacgagaagtatggcattgagtcgtttgcattgatccacgattcctttggtaccatcccggcggacgctgcgaacctgtttaaagcggttcgcgaaaccatggttgacacctatgaaagttgcgatgttctggcagacttttatgatcagttcgccgaccaactgcatgagtcccagctggataaaatgccggcgttaccggcgaagggcaacttaaatctccgcgacatcctggaatctgatttcgccttcgcgtaa

SEQ ID NO: 271 - DNA, 2652 bp, synthetic construct
  source 1..2652: mol_type = other DNA
atgaatacaattaacatagctaaaaatgatttcagcgatattgaactggctgcgatcccgtttaataccttggcggaccattatggtgagcgtctggcgcgtgagcaacttgctctggagcacgaatcctacgagatgggtgaagcgcgtttccggaagatgttcgagcgccagcttaaggctggcgaggtggcggataacgctgctgcgaagccgttgattacgaccctgctgccgaaaatgattgcgcgtattaacgattggttcgaggaagtgaaagcaaagcgtggtaaacgtccaaccgcattccagtttctgcaagagatcaagccggaggcggtggcatacattacgatcaaaaccactctcgcatgtctcaccagcgcggataatactacggtccaagcggtggccagcgcgattggccgcgcgattgaggacgaagcgcgttttggtcgcattcgtgacctggaagcgaaacattttaagaagaacgttgaagaacaattgaatggagctgtgggccacgtttacaagaaagcgttcatgcaagtcgttgaagctgatatgctgagcaaaggcctgttaggtggtgaagcatggagcagctggcataaggaggactcaattcacgtcggcgtgcggtgcattgaaatgctgatcgaatcgaccggtatggttagcctgcatcgccaaaacgccggcgtggtgggtcaagatagcgaaacgattgaactggcgccagagtacgcggaagctatcgctaccagagccggcgcattggcggggatcagcccgatgttccagccgtgtgttgtaccaccgaagccgtggaccggtatcaccggtggaggttactgggcgaatggtagacgtccgttggcgttggttcgtacccatagcaaaaaggctctgatgcgttatgaagacgtttacatgccggaagtgtacaaagccatcaacatcgcgcagaacactgcgtggaaaatcaacaaaaaggtgttagctgtggcgaacgtaattacaaaatggaagcactgcccggttgaggacatcccggctattgaacgtgaagagctgccaatgaaaccagaggacattgacatgaatccggaggcgctgaccgcatggaaacgtgcggcagcagcggtctatcgttacgataaagccagaaagagccgtcgtatctccctggaattcatgcttgagcaggcgaacaaattcgctaaccacaaagccatctggtttccgtataatatggattggcgtggtcgtgtttacgcggtatcgatgttcaacccgcagggtaatgacatgaccaagggtttgttgaccttggccaaaggtaaaccgattggcaaagaaggttactattggttgaagatccacggtgcgaactgcgcaggggtggataaggtaccgttcccggaacgtattaaattcatcgaggaaaaccacgaaaacattatggcgtgcgcaaagagcccgctggaaaacacgtggtgggcagagcaggacagtccattctgcttcttggcgttctgtttcgaatatgcaggtgtccagcaccacggcctgagctataactgcagcctgccgctggcctttgatggttcttgtagcggtattcaacactttagcgccatgctgcgcgatgaggttggtggcagagcagtgaatctgctgccaagcgaaaccgtgcaagatatctatggcattgtggctaagaaggttaatgaaatcctgcaagcagacgcgattaacggcacggacaacgaggttgtcaccgtgaccgatgaaaacaccggtgagatctcggagaaagtgaaactgggcaccaaagccttggctggccaatggctggcatacggcgttactcgctccgtgaccaagcgttcggtgatgacccttgcttacggcagcaaagagtttggtttccgccaacaggttctggaggatactatccaaccggccatcgactctggtaaaggcctgatgttcacgcagccgaatcaggcagcgggctatatggcgaagctgatttgggaatcggttagcgttaccgttgttgcagcggtggaggctatgaactggctgaaatctgcggcgaagctgttagctgcggaggtgaaggacaagaagacgggcgaaatcctgcgtaagcgctgcgcagtgcattgggttacgccggatggttttccggtatggcaggagtacaaaaagcctattcagacccgtctgaacctgatgtttctgggtcaatttcgtctgcagccgacgatcaacaccaataaggactccgagatcgacgcgcacaaacaggagtctggcatcgcacccaatttcgttcactcacaggacggttcccatctgcgtaagaccgtcgtgtgggcacacgagaagtatggcattgagtcgtttgcattgatccacgattcctttggtaccatcccggcggacgctgcgaacctgtttaaagcggttcgcgaaaccatggttgacacctatgaaagttgcgatgttctggcagacttttatgatcagttcgccgaccaactgcatgagtcccagctggataaaatgccggcgttaccggcgaagggcaacttaaatctccgcgacatcctggaatctgatttcgccttcgcgtaa

SEQ ID NO: 272 - DNA, 2652 bp, synthetic construct
  source 1..2652: mol_type = other DNA
atgaatacaattaacatagctaaaaatgatttcagcgatattgaactggctgcgatcccgtttaataccttggcggaccattatggtgagcgtctggcgcgtgagcaacttgctctggagcacgaatcctacgagatgggtgaagcgcgtttccggaagatgttcgagcgccagcttaaggctggcgaggtggcggataacgctgctgcgaagccgttgattacgaccctgctgccgaaaatgattgcgcgtattaacgattggttcgaggaagtgaaagcaaagcgtggtaaacgtccaaccgcattccagtttctgcaagagatcaagccggaggcggtggcatacattacgatcaaaaccactctcgcatgtctcaccagcgcggataatactacggtccaagcggtggccagcgcgattggccgcgcgattgaggacgaagcgcgttttggtcgcattcgtgacctggaagcgaaacattttaagaagaacgttgaagaacaattgaatggaggtgtgggccacgtttacaagaaagcgttcatgcaagtcgttgaagctgatatgctgagcaaaggcctgttaggtggtgaagcatggagcagctggcataaggaggactcaattcacgtcggcgtgcggtgcattgaaatgctgatcgaatcgaccggtatggttagcctgcatcgccaaaacgccggcgtggtgggtcaagatagcgaaacgattgaactggcgccagagtacgcggaagctatcgctaccagagccggcgcattggcggggatcagcccgatgttccagccgtgtgttgtaccaccgaagccgtggaccggtatcaccggtggaggttactgggcgaatggtagacgtccgttggcgttggttcgtacccatagcaaaaaggctctgatgcgttatgaagacgtttacatgccggaagtgtacaaagccatcaacatcgcgcagaacactgcgtggaaaatcaacaaaaaggtgttagctgtggcgaacgtaattacaaaatggaagcactgcccggttgaggacatcccggctattgaacgtgaagagctgccaatgaaaccagaggacattgacatgaatccggaggcgctgaccgcatggaaacgtgcggcagcagcggtctatcgttacgataaagccagaaagagccgtcgtatctccctggaattcatgcttgagcaggcgaacaaattcgctaaccacaaagccatctggtttccgtataatatggattggcgtggtcgtgtttacgcggtatcgatgttcaacccgcagggtaatgacatgaccaagggtttgttgaccttggccaaaggtaaaccgattggcaaagaaggttactattggttgaagatccacggtgcgaactgcgcaggggtggataaggtaccgttcccggaacgtattaaattcatcgaggaaaaccacgaaaacattatggcgtgcgcaaagagcccgctggaaaacacgtggtgggcagagcaggacagtccattctgcttcttggcgttctgtttcgaatatgcaggtgtccagcaccacggcctgagctataactgcagcctgccgctggcctttgatggttcttgtagcggtattcaacactttagcgccatgctgcgcgatgaggttggtggcagagcagtgaatctgctgccaagcgaaaccgtgcaagatatctatggcattgtggctaagaaggttaatgaaatcctgcaagcagacgcgattaacggcacggacaacgaggttgtcaccgtgaccgatgaaaacaccggtgagatctcggagaaagtgaaactgggcaccaaagccttggctggccaatggctggcatacggcgttactcgctccgtgaccaagcgttcggtgatgacccttgcttacggcagcaaagagtttggtttccgccaacaggttctggaggatactatccaaccggccatcgactctggtaaaggcctgatgttcacgcagccgaatcaggcagcgggctatatggcgaagctgatttgggaatcggttagcgttaccgttgttgcagcggtggaggctatgaactggctgaaatctgcggcgaagctgttagctgcggaggtgaaggacaagaagacgggcgaaatcctgcgtaagcgctgcgcagtgcattgggttacgccggatggttttccggtatggcaggagtacaaaaagcctattcagacccgtctgaacctgatgtttctgggtcaatttcgtctgcagccgacgatcaacaccaataaggactccgagatcgacgcgcacaaacaggagtctggcatcgcacccaatttcgttcactcacaggacggttcccatctgcgtaagaccgtcgtgtgggcacacgagaagtatggcattgagtcgtttgcattgatccacgattcctttggtaccatcccggcggacgctgcgaacctgtttaaagcggttcgcgaaaccatggttgacacctatgaaagttgcgatgttctggcagacttttatgatcagttcgccgaccaactgcatgagtcccagctggataaaatgccggcgttaccggcgaagggcaacttaaatctccgcgacatcctggaatctgatttcgccttcgcgtaa

SEQ ID NO: 273 - DNA, 2649 bp, synthetic construct
  source 1..2649: mol_type = other DNA
atgaatacaattaacatagctaaaaatgatttcagcgatattgaactggctgcgatcccgtttaataccttggcggaccattatggtgagcgtctggcgcgtgagcaacttgctctggagcacgaatcctacgagatgggtgaagcgcgtttccggaagatgttcgagcgccagcttaaggctggcgaggtggcggataacgctgctgcgaagccgttgattacgaccctgctgccgaaaatgattgcgcgtattaacgattggttcgaggaagtgaaagcaaagcgtggtaaacgtccaaccgcattccagtttctgcaagagatcaagccggaggcggtggcatacattacgatcaaaaccactctcgcatgtctcaccagcgcggataatactacggtccaagcggtggccagcgcgattggccgcgcgattgaggacgaagcgcgttttggtcgcattcgtgacctggaagcgaaacattttaagaagaacgttgaagaacaattgaatggagtgggccacgtttacaagaaagcgttcatgcaagtcgttgaagctgatatgctgagcaaaggcctgttaggtggtgaagcatggagcagctggcataaggaggactcaattcacgtcggcgtgcggtgcattgaaatgctgatcgaatcgaccggtatggttagcctgcatcgccaaaacgccggcgtggtgggtcaagatagcgaaacgattgaactggcgccagagtacgcggaagctatcgctaccagagccggcgcattggcggggatcagcccgatgttccagccgtgtgttgtaccaccgaagccgtggaccggtatcaccggtggaggttactgggcgaatggtagacgtccgttggcgttggttcgtacccatagcaaaaaggctctgatgcgttatgaagacgtttacatgccggaagtgtacaaagccatcaacatcgcgcagaacactgcgtggaaaatcaacaaaaaggtgttagctgtggcgaacgtaattacaaaatggaagcactgcccggttgaggacatcccggctattgaacgtgaagagctgccaatgaaaccagaggacattgacatgaatccggaggcgctgaccgcatggaaacgtgcggcagcagcggtctatcgttacgataaagccagaaagagccgtcgtatctccctggaattcatgcttgagcaggcgaacaaattcgctaaccacaaagccatctggtttccgtataatatggattggcgtggtcgtgtttacgcggtatcgatgttcaacccgcagggtaatgacatgaccaagggtttgttgaccttggccaaaggtaaaccgattggcaaagaaggttactattggttgaagatccacggtgcgaactgcgcaggggtggataaggtaccgttcccggaacgtattaaattcatcgaggaaaaccacgaaaacattatggcgtgcgcaaagagcccgctggaaaacacgtggtgggcagagcaggacagtccattctgcttcttggcgttctgtttcgaatatgcaggtgtccagcaccacggcctgagctataactgcagcctgccgctggcctttgatggttcttgtagcggtattcaacactttagcgccatgctgcgcgatgaggttggtggcagagcagtgaatctgctgccaagcgaaaccgtgcaagatatctatggcattgtggctaagaaggttaatgaaatcctgcaagcagacgcgattaacggcacggacaacgaggttgtcaccgtgaccgatgaaaacaccggtgagatctcggagaaagtgaaactgggcaccaaagccttggctggccaatggctggcatacggcgttactcgctccgtgaccaagcgttcggtgatgacccttgcttacggcagcaaagagtttggtttccgccaacaggttctggaggatactatccaaccggccatcgactctggtaaaggcctgatgttcacgcagccgaatcaggcagcgggctatatggcgaagctgatttgggaatcggttagcgttaccgttgttgcagcggtggaggctatgaactggctgaaatctgcggcgaagctgttagctgcggaggtgaaggacaagaagacgggcgaaatcctgcgtaagcgctgcgcagtgcattgggttacgccggatggttttccggtatggcaggagtacaaaaagcctattcagacccgtctgaacctgatgtttctgggtcaatttcgtctgcagccgacgatcaacaccaataaggactccgagatcgacgcgcacaaacaggagtctggcatcgcacccaatttcgttcactcacaggacggttcccatctgcgtaagaccgtcgtgtgggcacacgagaagtatggcattgagtcgtttgcattgatccacgattcctttggtaccatcccggcggacgctgcgaacctgtttaaagcggttcgcgaaaccatggttgacacctatgaaagttgcgatgttctggcagacttttatgatcagttcgccgaccaactgcatgagtcccagctggataaaatgccggcgttaccggcgaagggcaacttaaatctccgcgacatcctggaatctgatttcgccttcgcgtaa

SEQ ID NO: 274 - DNA, 2652 bp, synthetic construct
  source 1..2652: mol_type = other DNA
atgaatacaattaacatagctaaaaatgatttcagcgatattgaactggctgcgatcccgtttaataccttggcggaccattatggtgagcgtctggcgcgtgagcaacttgctctggagcacgaatcctacgagatgggtgaagcgcgtttccggaagatgttcgagcgccagcttaaggctggcgaggtggcggataacgctgctgcgaagccgttgattacgaccctgctgccgaaaatgattgcgcgtattaacgattggttcgaggaagtgaaagcaaagcgtggtaaacgtccaaccgcattccagtttctgcaagagatcaagccggaggcggtggcatacattacgatcaaaaccactctcgcatgtctcaccagcgcggataatactacggtccaagcggtggccagcgcgattggccgcgcgattgaggacgaagcgcgttttggtcgcattcgtgacctggaagcgaaacattttaagaagaacgttgaagaacaattgaatgcagctgtgggccacgtttacaagaaagcgttcatgcaagtcgttgaagctgatatgctgagcaaaggcctgttaggtggtgaagcatggagcagctggcataaggaggactcaattcacgtcggcgtgcggtgcattgaaatgctgatcgaatcgaccggtatggttagcctgcatcgccaaaacgccggcgtggtgggtcaagatagcgaaacgattgaactggcgccagagtacgcggaagctatcgctaccagagccggcgcattggcggggatcagcccgatgttccagccgtgtgttgtaccaccgaagccgtggaccggtatcaccggtggaggttactgggcgaatggtagacgtccgttggcgttggttcgtacccatagcaaaaaggctctgatgcgttatgaagacgtttacatgccggaagtgtacaaagccatcaacatcgcgcagaacactgcgtggaaaatcaacaaaaaggtgttagctgtggcgaacgtaattacaaaatggaagcactgcccggttgaggacatcccggctattgaacgtgaagagctgccaatgaaaccagaggacattgacatgaatccggaggcgctgaccgcatggaaacgtgcggcagcagcggtctatcgtagtgataaagccagaaagagccgtcgtatctccctggaattcatgcttgagcaggcgaacaaattcgctaaccacaaagccatctggtttccgtataatatggattggcgtggtcgtgtttacgcggtatcgatgttcaacccgcagggtaatgacatgaccaagggtttgttgaccttggccaaaggtaaaccgattggcaaagaaggttactattggttgaagatccacggtgcgaactgcgcaggggtggataaggtaccgttcccggaacgtattaaattcatcgaggaaaaccacgaaaacattatggcgtgcgcaaagagcccgctggaaaacacgtggtgggcagagcaggacagtccattctgcttcttggcgttctgtttcgaatatgcaggtgtccagcaccacggcctgagctataactgcagcctgccgctggcctttgatggttcttgtagcggtattcaacactttagcgccatgctgcgcgatgaggttggtggcagagcagtgaatctgctgccaagcgaaaccgtgcaagatatctatggcattgtggctaagaaggttaatgaaatcctgcaagcagacgcgattaacggcacggacaacgaggttgtcaccgtgaccgatgaaaacaccggtgagatctcggagaaagtgaaactgggcaccaaagccttggctggccaatggctggcatacggcgttactcgctccgtgaccaagcgttcggtgatgacccttgcttacggcagcaaagagtttggtttccgccaacaggttctggaggatactatccaaccggccatcgactctggtaaaggcctgatgttcacgcagccgaatcaggcagcgggctatatggcgaagctgatttgggaatcggttagcgttaccgttgttgcagcggtggaggctatgaactggctgaaatctgcggcgaagctgttagctgcggaggtgaaggacaagaagacgggcgaaatcctgcgtaagcgctgcgcagtgcattgggttacgccggatggttttccggtatggcaggagtacaaaaagcctattcagacccgtctgaacctgatgtttctgggtcaatttcgtctgcagccgacgatcaacaccaataaggactccgagatcgacgcgcacaaacaggagtctggcatcgcacccaatttcgttcactcacaggacggttcccatctgcgtaagaccgtcgtgtgggcacacgagaagtatggcattgagtcgtttgcattgatccacgattcctttggtaccatcccggcggacgctgcgaacctgtttaaagcggttcgcgaaaccatggttgacacctatgaaagttgcgatgttctggcagacttttatgatcagttcgccgaccaactgcatgagtcccagctggataaaatgccggcgttaccggcgaagggcaacttaaatctccgcgacatcctggaatctgatttcgccttcgcgtaa

SEQ ID NO: 275 - DNA, 2652 bp, synthetic construct
  source 1..2652: mol_type = other DNA
atgaatacaattaacatagctaaaaatgatttcagcgatattgaactggctgcgatcccgtttaataccttggcggaccattatggtgagcgtctggcgcgtgagcaacttgctctggagcacgaatcctacgagatgggtgaagcgcgtttccggaagatgttcgagcgccagcttaaggctggcgaggtggcggataacgctgctgcgaagccgttgattacgaccctgctgccgaaaatgattgcgcgtattaacgattggttcgaggaagtgaaagcaaagcgtggtaaacgtccaaccgcattccagtttctgcaagagatcaagccggaggcggtggcatacattacgatcaaaaccactctcgcatgtctcaccagcgcggataatactacggtccaagcggtggccagcgcgattggccgcgcgattgaggacgaagcgcgttttggtcgcattcgtgacctggaagcgaaacattttaagaagaacgttgaagaacaattgaatgcaggtgtgggccacgtttacaagaaagcgttcatgcaagtcgttgaagctgatatgctgagcaaaggcctgttaggtggtgaagcatggagcagctggcataaggaggactcaattcacgtcggcgtgcggtgcattgaaatgctgatcgaatcgaccggtatggttagcctgcatcgccaaaacgccggcgtggtgggtcaagatagcgaaacgattgaactggcgccagagtacgcggaagctatcgctaccagagccggcgcattggcggggatcagcccgatgttccagccgtgtgttgtaccaccgaagccgtggaccggtatcaccggtggaggttactgggcgaatggtagacgtccgttggcgttggttcgtacccatagcaaaaaggctctgatgcgttatgaagacgtttacatgccggaagtgtacaaagccatcaacatcgcgcagaacactgcgtggaaaatcaacaaaaaggtgttagctgtggcgaacgtaattacaaaatggaagcactgcccggttgaggacatcccggctattgaacgtgaagagctgccaatgaaaccagaggacattgacatgaatccggaggcgctgaccgcatggaaacgtgcggcagcagcggtctatcgtagtgataaagccagaaagagccgtcgtatctccctggaattcatgcttgagcaggcgaacaaattcgctaaccacaaagccatctggtttccgtataatatggattggcgtggtcgtgtttacgcggtatcgatgttcaacccgcagggtaatgacatgaccaagggtttgttgaccttggccaaaggtaaaccgattggcaaagaaggttactattggttgaagatccacggtgcgaactgcgcaggggtggataaggtaccgttcccggaacgtattaaattcatcgaggaaaaccacgaaaacattatggcgtgcgcaaagagcccgctggaaaacacgtggtgggcagagcaggacagtccattctgcttcttggcgttctgtttcgaatatgcaggtgtccagcaccacggcctgagctataactgcagcctgccgctggcctttgatggttcttgtagcggtattcaacactttagcgccatgctgcgcgatgaggttggtggcagagcagtgaatctgctgccaagcgaaaccgtgcaagatatctatggcattgtggctaagaaggttaatgaaatcctgcaagcagacgcgattaacggcacggacaacgaggttgtcaccgtgaccgatgaaaacaccggtgagatctcggagaaagtgaaactgggcaccaaagccttggctggccaatggctggcatacggcgttactcgctccgtgaccaagcgttcggtgatgacccttgcttacggcagcaaagagtttggtttccgccaacaggttctggaggatactatccaaccggccatcgactctggtaaaggcctgatgttcacgcagccgaatcaggcagcgggctatatggcgaagctgatttgggaatcggttagcgttaccgttgttgcagcggtggaggctatgaactggctgaaatctgcggcgaagctgttagctgcggaggtgaaggacaagaagacgggcgaaatcctgcgtaagcgctgcgcagtgcattgggttacgccggatggttttccggtatggcaggagtacaaaaagcctattcagacccgtctgaacctgatgtttctgggtcaatttcgtctgcagccgacgatcaacaccaataaggactccgagatcgacgcgcacaaacaggagtctggcatcgcacccaatttcgttcactcacaggacggttcccatctgcgtaagaccgtcgtgtgggcacacgagaagtatggcattgagtcgtttgcattgatccacgattcctttggtaccatcccggcggacgctgcgaacctgtttaaagcggttcgcgaaaccatggttgacacctatgaaagttgcgatgttctggcagacttttatgatcagttcgccgaccaactgcatgagtcccagctggataaaatgccggcgttaccggcgaagggcaacttaaatctccgcgacatcctggaatctgatttcgccttcgcgtaa

SEQ ID NO: 276 - DNA, 2649 bp, synthetic construct
  source 1..2649: mol_type = other DNA
atgaatacaattaacatagctaaaaatgatttcagcgatattgaactggctgcgatcccgtttaataccttggcggaccattatggtgagcgtctggcgcgtgagcaacttgctctggagcacgaatcctacgagatgggtgaagcgcgtttccggaagatgttcgagcgccagcttaaggctggcgaggtggcggataacgctgctgcgaagccgttgattacgaccctgctgccgaaaatgattgcgcgtattaacgattggttcgaggaagtgaaagcaaagcgtggtaaacgtccaaccgcattccagtttctgcaagagatcaagccggaggcggtggcatacattacgatcaaaaccactctcgcatgtctcaccagcgcggataatactacggtccaagcggtggccagcgcgattggccgcgcgattgaggacgaagcgcgttttggtcgcattcgtgacctggaagcgaaacattttaagaagaacgttgaagaacaattgaatgcagtgggccacgtttacaagaaagcgttcatgcaagtcgttgaagctgatatgctgagcaaaggcctgttaggtggtgaagcatggagcagctggcataaggaggactcaattcacgtcggcgtgcggtgcattgaaatgctgatcgaatcgaccggtatggttagcctgcatcgccaaaacgccggcgtggtgggtcaagatagcgaaacgattgaactggcgccagagtacgcggaagctatcgctaccagagccggcgcattggcggggatcagcccgatgttccagccgtgtgttgtaccaccgaagccgtggaccggtatcaccggtggaggttactgggcgaatggtagacgtccgttggcgttggttcgtacccatagcaaaaaggctctgatgcgttatgaagacgtttacatgccggaagtgtacaaagccatcaacatcgcgcagaacactgcgtggaaaatcaacaaaaaggtgttagctgtggcgaacgtaattacaaaatggaagcactgcccggttgaggacatcccggctattgaacgtgaagagctgccaatgaaaccagaggacattgacatgaatccggaggcgctgaccgcatggaaacgtgcggcagcagcggtctatcgtagtgataaagccagaaagagccgtcgtatctccctggaattcatgcttgagcaggcgaacaaattcgctaaccacaaagccatctggtttccgtataatatggattggcgtggtcgtgtttacgcggtatcgatgttcaacccgcagggtaatgacatgaccaagggtttgttgaccttggccaaaggtaaaccgattggcaaagaaggttactattggttgaagatccacggtgcgaactgcgcaggggtggataaggtaccgttcccggaacgtattaaattcatcgaggaaaaccacgaaaacattatggcgtgcgcaaagagcccgctggaaaacacgtggtgggcagagcaggacagtccattctgcttcttggcgttctgtttcgaatatgcaggtgtccagcaccacggcctgagctataactgcagcctgccgctggcctttgatggttcttgtagcggtattcaacactttagcgccatgctgcgcgatgaggttggtggcagagcagtgaatctgctgccaagcgaaaccgtgcaagatatctatggcattgtggctaagaaggttaatgaaatcctgcaagcagacgcgattaacggcacggacaacgaggttgtcaccgtgaccgatgaaaacaccggtgagatctcggagaaagtgaaactgggcaccaaagccttggctggccaatggctggcatacggcgttactcgctccgtgaccaagcgttcggtgatgacccttgcttacggcagcaaagagtttggtttccgccaacaggttctggaggatactatccaaccggccatcgactctggtaaaggcctgatgttcacgcagccgaatcaggcagcgggctatatggcgaagctgatttgggaatcggttagcgttaccgttgttgcagcggtggaggctatgaactggctgaaatctgcggcgaagctgttagctgcggaggtgaaggacaagaagacgggcgaaatcctgcgtaagcgctgcgcagtgcattgggttacgccggatggttttccggtatggcaggagtacaaaaagcctattcagacccgtctgaacctgatgtttctgggtcaatttcgtctgcagccgacgatcaacaccaataaggactccgagatcgacgcgcacaaacaggagtctggcatcgcacccaatttcgttcactcacaggacggttcccatctgcgtaagaccgtcgtgtgggcacacgagaagtatggcattgagtcgtttgcattgatccacgattcctttggtaccatcccggcggacgctgcgaacctgtttaaagcggttcgcgaaaccatggttgacacctatgaaagttgcgatgttctggcagacttttatgatcagttcgccgaccaactgcatgagtcccagctggataaaatgccggcgttaccggcgaagggcaacttaaatctccgcgacatcctggaatctgatttcgccttcgcgtaa

SEQ ID NO: 277 - DNA, 2652 bp, synthetic construct
  source 1..2652: mol_type = other DNA
atgaatacaattaacatagctaaaaatgatttcagcgatattgaactggctgcgatcccgtttaataccttggcggaccattatggtgagcgtctggcgcgtgagcaacttgctctggagcacgaatcctacgagatgggtgaagcgcgtttccggaagatgttcgagcgccagcttaaggctggcgaggtggcggataacgctgctgcgaagccgttgattacgaccctgctgccgaaaatgattgcgcgtattaacgattggttcgaggaagtgaaagcaaagcgtggtaaacgtccaaccgcattccagtttctgcaagagatcaagccggaggcggtggcatacattacgatcaaaaccactctcgcatgtctcaccagcgcggataatactacggtccaagcggtggccagcgcgattggccgcgcgattgaggacgaagcgcgttttggtcgcattcgtgacctggaagcgaaacattttaagaagaacgttgaagaacaattgaatggagctgtgggccacgtttacaagaaagcgttcatgcaagtcgttgaagctgatatgctgagcaaaggcctgttaggtggtgaagcatggagcagctggcataaggaggactcaattcacgtcggcgtgcggtgcattgaaatgctgatcgaatcgaccggtatggttagcctgcatcgccaaaacgccggcgtggtgggtcaagatagcgaaacgattgaactggcgccagagtacgcggaagctatcgctaccagagccggcgcattggcggggatcagcccgatgttccagccgtgtgttgtaccaccgaagccgtggaccggtatcaccggtggaggttactgggcgaatggtagacgtccgttggcgttggttcgtacccatagcaaaaaggctctgatgcgttatgaagacgtttacatgccggaagtgtacaaagccatcaacatcgcgcagaacactgcgtggaaaatcaacaaaaaggtgttagctgtggcgaacgtaattacaaaatggaagcactgcccggttgaggacatcccggctattgaacgtgaagagctgccaatgaaaccagaggacattgacatgaatccggaggcgctgaccgcatggaaacgtgcggcagcagcggtctatcgtagtgataaagccagaaagagccgtcgtatctccctggaattcatgcttgagcaggcgaacaaattcgctaaccacaaagccatctggtttccgtataatatggattggcgtggtcgtgtttacgcggtatcgatgttcaacccgcagggtaatgacatgaccaagggtttgttgaccttggccaaaggtaaaccgattggcaaagaaggttactattggttgaagatccacggtgcgaactgcgcaggggtggataaggtaccgttcccggaacgtattaaattcatcgaggaaaaccacgaaaacattatggcgtgcgcaaagagcccgctggaaaacacgtggtgggcagagcaggacagtccattctgcttcttggcgttctgtttcgaatatgcaggtgtccagcaccacggcctgagctataactgcagcctgccgctggcctttgatggttcttgtagcggtattcaacactttagcgccatgctgcgcgatgaggttggtggcagagcagtgaatctgctgccaagcgaaaccgtgcaagatatctatggcattgtggctaagaaggttaatgaaatcctgcaagcagacgcgattaacggcacggacaacgaggttgtcaccgtgaccgatgaaaacaccggtgagatctcggagaaagtgaaactgggcaccaaagccttggctggccaatggctggcatacggcgttactcgctccgtgaccaagcgttcggtgatgacccttgcttacggcagcaaagagtttggtttccgccaacaggttctggaggatactatccaaccggccatcgactctggtaaaggcctgatgttcacgcagccgaatcaggcagcgggctatatggcgaagctgatttgggaatcggttagcgttaccgttgttgcagcggtggaggctatgaactggctgaaatctgcggcgaagctgttagctgcggaggtgaaggacaagaagacgggcgaaatcctgcgtaagcgctgcgcagtgcattgggttacgccggatggttttccggtatggcaggagtacaaaaagcctattcagacccgtctgaacctgatgtttctgggtcaatttcgtctgcagccgacgatcaacaccaataaggactccgagatcgacgcgcacaaacaggagtctggcatcgcacccaatttcgttcactcacaggacggttcccatctgcgtaagaccgtcgtgtgggcacacgagaagtatggcattgagtcgtttgcattgatccacgattcctttggtaccatcccggcggacgctgcgaacctgtttaaagcggttcgcgaaaccatggttgacacctatgaaagttgcgatgttctggcagacttttatgatcagttcgccgaccaactgcatgagtcccagctggataaaatgccggcgttaccggcgaagggcaacttaaatctccgcgacatcctggaatctgatttcgccttcgcgtaa

SEQ ID NO: 278 - DNA, 2652 bp, synthetic construct
  source 1..2652: mol_type = other DNA
atgaatacaattaacatagctaaaaatgatttcagcgatattgaactggctgcgatcccgtttaataccttggcggaccattatggtgagcgtctggcgcgtgagcaacttgctctggagcacgaatcctacgagatgggtgaagcgcgtttccggaagatgttcgagcgccagcttaaggctggcgaggtggcggataacgctgctgcgaagccgttgattacgaccctgctgccgaaaatgattgcgcgtattaacgattggttcgaggaagtgaaagcaaagcgtggtaaacgtccaaccgcattccagtttctgcaagagatcaagccggaggcggtggcatacattacgatcaaaaccactctcgcatgtctcaccagcgcggataatactacggtccaagcggtggccagcgcgattggccgcgcgattgaggacgaagcgcgttttggtcgcattcgtgacctggaagcgaaacattttaagaagaacgttgaagaacaattgaatggaggtgtgggccacgtttacaagaaagcgttcatgcaagtcgttgaagctgatatgctgagcaaaggcctgttaggtggtgaagcatggagcagctggcataaggaggactcaattcacgtcggcgtgcggtgcattgaaatgctgatcgaatcgaccggtatggttagcctgcatcgccaaaacgccggcgtggtgggtcaagatagcgaaacgattgaactggcgccagagtacgcggaagctatcgctaccagagccggcgcattggcggggatcagcccgatgttccagccgtgtgttgtaccaccgaagccgtggaccggtatcaccggtggaggttactgggcgaatggtagacgtccgttggcgttggttcgtacccatagcaaaaaggctctgatgcgttatgaagacgtttacatgccggaagtgtacaaagccatcaacatcgcgcagaacactgcgtggaaaatcaacaaaaaggtgttagctgtggcgaacgtaattacaaaatggaagcactgcccggttgaggacatcccggctattgaacgtgaagagctgccaatgaaaccagaggacattgacatgaatccggaggcgctgaccgcatggaaacgtgcggcagcagcggtctatcgtagtgataaagccagaaagagccgtcgtatctccctggaattcatgcttgagcaggcgaacaaattcgctaaccacaaagccatctggtttccgtataatatggattggcgtggtcgtgtttacgcggtatcgatgttcaacccgcagggtaatgacatgaccaagggtttgttgaccttggccaaaggtaaaccgattggcaaagaaggttactattggttgaagatccacggtgcgaactgcgcaggggtggataaggtaccgttcccggaacgtattaaattcatcgaggaaaaccacgaaaacattatggcgtgcgcaaagagcccgctggaaaacacgtggtgggcagagcaggacagtccattctgcttcttggcgttctgtttcgaatatgcaggtgtccagcaccacggcctgagctataactgcagcctgccgctggcctttgatggttcttgtagcggtattcaacactttagcgccatgctgcgcgatgaggttggtggcagagcagtgaatctgctgccaagcgaaaccgtgcaagatatctatggcattgtggctaagaaggttaatgaaatcctgcaagcagacgcgattaacggcacggacaacgaggttgtcaccgtgaccgatgaaaacaccggtgagatctcggagaaagtgaaactgggcaccaaagccttggctggccaatggctggcatacggcgttactcgctccgtgaccaagcgttcggtgatgacccttgcttacggcagcaaagagtttggtttccgccaacaggttctggaggatactatccaaccggccatcgactctggtaaaggcctgatgttcacgcagccgaatcaggcagcgggctatatggcgaagctgatttgggaatcggttagcgttaccgttgttgcagcggtggaggctatgaactggctgaaatctgcggcgaagctgttagctgcggaggtgaaggacaagaagacgggcgaaatcctgcgtaagcgctgcgcagtgcattgggttacgccggatggttttccggtatggcaggagtacaaaaagcctattcagacccgtctgaacctgatgtttctgggtcaatttcgtctgcagccgacgatcaacaccaataaggactccgagatcgacgcgcacaaacaggagtctggcatcgcacccaatttcgttcactcacaggacggttcccatctgcgtaagaccgtcgtgtgggcacacgagaagtatggcattgagtcgtttgcattgatccacgattcctttggtaccatcccggcggacgctgcgaacctgtttaaagcggttcgcgaaaccatggttgacacctatgaaagttgcgatgttctggcagacttttatgatcagttcgccgaccaactgcatgagtcccagctggataaaatgccggcgttaccggcgaagggcaacttaaatctccgcgacatcctggaatctgatttcgccttcgcgtaa

SEQ ID NO: 279 - DNA, 2649 bp, synthetic construct
  source 1..2649: mol_type = other DNA
atgaatacaattaacatagctaaaaatgatttcagcgatattgaactggctgcgatcccgtttaataccttggcggaccattatggtgagcgtctggcgcgtgagcaacttgctctggagcacgaatcctacgagatgggtgaagcgcgtttccggaagatgttcgagcgccagcttaaggctggcgaggtggcggataacgctgctgcgaagccgttgattacgaccctgctgccgaaaatgattgcgcgtattaacgattggttcgaggaagtgaaagcaaagcgtggtaaacgtccaaccgcattccagtttctgcaagagatcaagccggaggcggtggcatacattacgatcaaaaccactctcgcatgtctcaccagcgcggataatactacggtccaagcggtggccagcgcgattggccgcgcgattgaggacgaagcgcgttttggtcgcattcgtgacctggaagcgaaacattttaagaagaacgttgaagaacaattgaatggagtgggccacgtttacaagaaagcgttcatgcaagtcgttgaagctgatatgctgagcaaaggcctgttaggtggtgaagcatggagcagctggcataaggaggactcaattcacgtcggcgtgcggtgcattgaaatgctgatcgaatcgaccggtatggttagcctgcatcgccaaaacgccggcgtggtgggtcaagatagcgaaacgattgaactggcgccagagtacgcggaagctatcgctaccagagccggcgcattggcggggatcagcccgatgttccagccgtgtgttgtaccaccgaagccgtggaccggtatcaccggtggaggttactgggcgaatggtagacgtccgttggcgttggttcgtacccatagcaaaaaggctctgatgcgttatgaagacgtttacatgccggaagtgtacaaagccatcaacatcgcgcagaacactgcgtggaaaatcaacaaaaaggtgttagctgtggcgaacgtaattacaaaatggaagcactgcccggttgaggacatcccggctattgaacgtgaagagctgccaatgaaaccagaggacattgacatgaatccggaggcgctgaccgcatggaaacgtgcggcagcagcggtctatcgtagtgataaagccagaaagagccgtcgtatctccctggaattcatgcttgagcaggcgaacaaattcgctaaccacaaagccatctggtttccgtataatatggattggcgtggtcgtgtttacgcggtatcgatgttcaacccgcagggtaatgacatgaccaagggtttgttgaccttggccaaaggtaaaccgattggcaaagaaggttactattggttgaagatccacggtgcgaactgcgcaggggtggataaggtaccgttcccggaacgtattaaattcatcgaggaaaaccacgaaaacattatggcgtgcgcaaagagcccgctggaaaacacgtggtgggcagagcaggacagtccattctgcttcttggcgttctgtttcgaatatgcaggtgtccagcaccacggcctgagctataactgcagcctgccgctggcctttgatggttcttgtagcggtattcaacactttagcgccatgctgcgcgatgaggttggtggcagagcagtgaatctgctgccaagcgaaaccgtgcaagatatctatggcattgtggctaagaaggttaatgaaatcctgcaagcagacgcgattaacggcacggacaacgaggttgtcaccgtgaccgatgaaaacaccggtgagatctcggagaaagtgaaactgggcaccaaagccttggctggccaatggctggcatacggcgttactcgctccgtgaccaagcgttcggtgatgacccttgcttacggcagcaaagagtttggtttccgccaacaggttctggaggatactatccaaccggccatcgactctggtaaaggcctgatgttcacgcagccgaatcaggcagcgggctatatggcgaagctgatttgggaatcggttagcgttaccgttgttgcagcggtggaggctatgaactggctgaaatctgcggcgaagctgttagctgcggaggtgaaggacaagaagacgggcgaaatcctgcgtaagcgctgcgcagtgcattgggttacgccggatggttttccggtatggcaggagtacaaaaagcctattcagacccgtctgaacctgatgtttctgggtcaatttcgtctgcagccgacgatcaacaccaataaggactccgagatcgacgcgcacaaacaggagtctggcatcgcacccaatttcgttcactcacaggacggttcccatctgcgtaagaccgtcgtgtgggcacacgagaagtatggcattgagtcgtttgcattgatccacgattcctttggtaccatcccggcggacgctgcgaacctgtttaaagcggttcgcgaaaccatggttgacacctatgaaagttgcgatgttctggcagacttttatgatcagttcgccgaccaactgcatgagtcccagctggataaaatgccggcgttaccggcgaagggcaacttaaatctccgcgacatcctggaatctgatttcgccttcgcgtaa

SEQ ID NO: 280 - DNA, 2649 bp, synthetic construct
  source 1..2649: mol_type = other DNA
atgaatacaattaacatagctaaaaatgatttcagcgatattgaactggctgcgatcccgtttaataccttggcggaccattatggtgagcgtctggcgcgtgagcaacttgctctggagcacgaatcctacgagatgggtgaagcgcgtttccggaagatgttcgagcgccagcttaaggctggcgaggtggcggataacgctgctgcgaagccgttgattacgaccctgctgccgaaaatgattgcgcgtattaacgattggttcgaggaagtgaaagcaaagcgtggtaaacgtccaaccgcattccagtttctgcaagagatcaagccggaggcggtggcatacattacgatcaaaaccactctcgcatgtctcaccagcgcggaaaatactacggtccaagcggtggccagcgcgattggccgcgcgattgaggacgaagcgcgttttggtcgcattcgtgacctggaagcgaaacattttaagaagaacgttgaagaacaattgaatcgcgtgggccacgtttacaagaaagcgttcatgcaagtcgttgaagctgatatgctgagcaaaggcctgttaggtggtgaagcatggagcagctggcataaggaggactcaattcacgtcggcgtgcggtgcattgaaatgctgatcgaatcgaccggtatggttagcctgcatcgccaaaacgccggcgtggtgggtcaagatagcgaaacgattgaactggcgccagagtacgcggaagctatcgctaccagagccggcgcattggcggggatcagcccgatgttccagccgtgtgttgtaccaccgaagccgtggaccggtatcaccggtggaggttactgggcgaatggtagacgtccgttggcgttggttcgtacccatagcaaaaaggctctgatgcgttatgaagacgtttacatgccggaagtgtacaaagccatcaacatcgcgcagaacactgcgtggaaaatcaacaaaaaggtgttagctgtggcgaacgtaattacaaaatggaagcactgcccggttgaggacatcccggctattgaacgtgaagagctgccaatgaaaccagaggacattgacatgaatccggaggcgctgaccgcatggaaacgtgcggcagcagcggtctatcgttacgataaagccagaaagagccgtcgtatctccctggaattcatgcttgagcaggcgaacaaattcgctaaccacaaagccatctggtttccgtataatatggattggcgtggtcgtgtttacgcggtatcgatgttcaacccgcagggtaatgacatgaccaagggtttgttgaccttggccaaaggtaaaccgattggcaaagaaggttactattggttgaagatccacggtgcgaactgcgcaggggtggataaggtaccgttcccggaacgtattaaattcatcgaggaaaaccacgaaaacattatggcgtgcgcaaagagcccgctggaaaacacgtggtgggcagagcaggacagtccattctgcttcttggcgttctgtttcgaatatgcaggtgtccagcaccacggcctgagctataactgcagcctgccgctggcctttgatggttcttgtagcggtattcaacactttagcgccatgctgcgcgatgaggttggtggcagagcagtgaatctgctgccaagcgaaaccgtgcaagatatctatggcattgtggctaagaaggttaatgaaatcctgcaagcagacgcgattaacggcacggacaacgaggttgtcaccgtgaccgatgaaaacaccggtgagatctcggagaaagtgaaactgggcaccaaagccttggctggccaatggctggcatacggcgttactcgctccgtgaccaagcgttcggtgatgacccttgcttacggcagcaaagagtttggtttccgccaacaggttctggaggatactatccaaccggccatcgactctggtaaaggcctgatgttcacgcagccgaatcaggcagcgggctatatggcgaagctgatttgggaatcggttagcgttaccgttgttgcagcggtggaggctatgaactggctgaaatctgcggcgaagctgttagctgcggaggtgaaggacaagaagacgggcgaaatcctgcgtaagcgctgcgcagtgcattgggttacgccggatggttttccggtatggcaggagtacaaaaagcctattcagacccgtctgaacctgatgtttctgggtcaatttcgtctgcagccgacgatcaacaccaataaggactccgagatcgacgcgcacaaacaggagtctggcatcgcacccaatttcgttcactcacaggacggttcccatctgcgtaagaccgtcgtgtgggcacacgagaagtatggcattgagtcgtttgcattgatccacgattcctttggtaccatcccggcggacgctgcgaacctgtttaaagcggttcgcgaaaccatggttgacacctatgaaagttgcgatgttctggcagacttttatgatcagttcgccgaccaactgcatgagtcccagctggataaaatgccggcgttaccggcgaagggcaacttaaatctccgcgacatcctggaatctgatttcgccttcgcgtaa

SEQ ID NO: 281 - DNA, 2649 bp, synthetic construct; identical to SEQ ID NO: 185
  source 1..2649: mol_type = other DNA

SEQ ID NO: 282 - DNA, 2652 bp, synthetic construct
  source 1..2652: mol_type = other DNA
atgaatacaattaacatagctaaaaatgatttcagcgatattgaactggctgcgatcccgtttaataccttggcggaccattatggtgagcgtctggcgcgtgagcaacttgctctggagcacgaatcctacgagatgggtgaagcgcgtttccggaagatgttcgagcgccagcttaaggctggcgaggtggcggataacgctgctgcgaagccgttgattacgaccctgctgccgaaaatgattgcgcgtattaacgattggttcgaggaagtgaaagcaaagcgtggtaaacgtccaaccgcattccagtttctgcaagagatcaagccggaggcggtggcatacattacgatcaaaaccactctcgcatgtctcaccagcgcggataatactacggtccaagcggtggccagcgcgattggccgcgcgattgaggacgaagcgcgttttggtcgcattcgtgacctggaagcgaaacattttaagaagaacgttgaagaacaattgaataaacgcgtgggccacgtttacaagaaagcgttcatgcaagtcgttgaagctgatatgctgagcaaaggcctgttaggtggtgaagcatggagcagctggcataaggaggactcaattcacgtcggcgtgcggtgcattgaaatgctgatcgaatcgaccggtatggttagcctgcatcgccaaaacgccggcgtggtgggtcaagatagcgaaacgattgaactggcgccagagtacgcggaagctatcgctaccagagccggcgcattggcggggatcagcccgatgttccagccgtgtgttgtaccaccgaagccgtggaccggtatcaccggtggaggttactgggcgaatggtagacgtccgttggcgttggttcgtacccatagcaaaaaggctctgatgcgttatgaagacgtttacatgccggaagtgtacaaagccatcaacatcgcgcagaacactgcgtggaaaatcaacaaaaaggtgttagctgtggcgaacgtaattacaaaatggaagcactgcccggttgaggacatcccggctattgaacgtgaagagctgccaatgaaaccagaggacattgacatgaatccggaggcgctgaccgcatggaaacgtgcggcagcagcggtctatcgtgcggataaagccagaaagagccgtcgtatctccctggaattcatgcttgagcaggcgaacaaattcgctaaccacaaagccatctggtttccgtataatatggattggcgtggtcgtgtttacgcggtatcgatgttcaacccgcagggtaatgacatgaccaagggtttgttgaccttggccaaaggtaaaccgattggcaaagaaggttactattggttgaagatccacggtgcgaactgcgcaggggtggataaggtaccgttcccggaacgtattaaattcatcgaggaaaaccacgaaaacattatggcgtgcgcaaagagcccgctggaaaacacgtggtgggcagagcaggacagtccattctgcttcttggcgttctgtttcgaatatgcaggtgtccagcaccacggcctgagctataactgcagcctgccgctggcctttgatggttcttgtagcggtattcaacactttagcgccatgctgcgcgatgaggttggtggcagagcagtgaatctgctgccaagcgaaaccgtgcaagatatctatggcattgtggctaagaaggttaatgaaatcctgcaagcagacgcgattaacggcacggacaacgaggttgtcaccgtgaccgatgaaaacaccggtgagatctcggagaaagtgaaactgggcaccaaagccttggctggccaatggctggcatacggcgttactcgctccgtgaccaagcgttcggtgatgacccttgcttacggcagcaaagagtttggtttccgccaacaggttctggaggatactatccaaccggccatcgactctggtaaaggcctgatgttcacgcagccgaatcaggcagcgggctatatggcgaagctgatttgggaatcggttagcgttaccgttgttgcagcggtggaggctatgaactggctgaaatctgcggcgaagctgttagctgcggaggtgaaggacaagaagacgggcgaaatcctgcgtaagcgctgcgcagtgcattgggttacgccggatggttttccggtatggcaggagtacaaaaagcctattcagacccgtctgaacctgatgtttctgggtcaatttcgtctgcagccgacgatcaacaccaataaggactccgagatcgacgcgcacaaacaggagtctggcatcgcacccaatttcgttcactcacaggacggttcccatctgcgtaagaccgtcgtgtgggcacacgagaagtatggcattgagtcgtttgcattgatccacgattcctttggtaccatcccggcggacgctgcgaacctgtttaaagcggttcgcgaaaccatggttgacacctatgaaagttgcgatgttctggcagacttttatgatcagttcgccgaccaactgcatgagtcccagctggataaaatgccggcgttaccggcgaagggcaacttaaatctccgcgacatcctggaatctgatttcgccttcgcgtaa

SEQ ID NO: 283 - DNA, 4388 bp, synthetic construct
  source 1..4388: mol_type = other DNA
taatacgactcactatagggagaaaataacaaatctcaacacaacatatacaaaacaaacgaatctcaagcaatcaagcattctacttctattgcagcaatttaaatcatttcttttaaagcaaaagcaattttctgaaaattttcaccatttacgaacgatagcagccaccatgttcgtgtttctggtgctgctgcctctggtgagctcccagtgcgtgaatctgaccacaaggacccagctgccccctgcctataccaactccttcacacggggcgtgtactatcccgacaaggtgttccggagcagcgtgctgcactccacacaggatctgtttctgcctttcttttctaacgtgacctggttccacgccatccacgtgagcggcaccaatggcacaaagaggttcgacaacccagtgctgcccttcaatgatggcgtgtacttcgcctccaccgagaagtctaatatcatccgcggctggatctttggcaccacactggacagcaagacacagtccctgctgatcgtgaacaatgccaccaacgtggtcatcaaggtgtgcgagttccagttttgtaacgatccattcctgggcgtgtactatcacaagaacaataagtcttggatggagagcgagtttcgcgtgtattcctctgccaacaattgcacatttgagtacgtgtcccagcccttcctgatggacctggagggcaagcagggcaatttcaagaacctgcgggagttcgtgtttaagaacatcgatggctacttcaaaatctactccaagcacaccccaatcaatctggtgagagacctgccacagggcttctctgccctggagccactggtggatctgcccatcggcatcaacatcacccggtttcagacactgctggccctgcacagaagctacctgacaccaggcgacagctcctctggatggaccgcaggagcagcagcctactatgtgggctatctgcagcccaggaccttcctgctgaagtacaacgagaatggcaccatcacagacgcagtggattgcgcactggaccccctgtctgagaccaagtgtacactgaagtcctttaccgtggagaagggcatctatcagacaagcaacttcagggtgcagcctaccgagtccatcgtgcgctttcccaatatcacaaacctgtgcccttttggcgaggtgttcaatgcaaccaggttcgcaagcgtgtacgcatggaataggaagcgcatctccaactgcgtggccgactattctgtgctgtacaatagcgcctccttctctacctttaagtgctacggcgtgagccccacaaagctgaatgacctgtgctttaccaacgtgtacgccgattccttcgtgatcaggggcgacgaggtgcgccagatcgcaccaggacagacaggcaagatcgcagactacaactataagctgcctgacgatttcaccggctgcgtgatcgcctggaacagcaacaatctggatagcaaagtgggcggcaactacaattatctgtaccggctgtttagaaagtctaacctgaagccattcgagagggacatctccacagaaatctaccaggccggctctaccccctgcaatggcgtggagggctttaactgttatttccctctgcagagctacggcttccagccaacaaatggcgtgggctatcagccctaccgcgtggtggtgctgtcttttgagctgctgcacgcccctgcaacagtgtgcggaccaaagaagtccaccaatctggtgaagaacaagtgcgtgaacttcaacttcaacggactgaccggcacaggcgtgctgaccgagtccaacaagaagttcctgccttttcagcagttcggcagggacatcgcagataccacagacgccgtgcgcgaccctcagaccctggagatcctggatatcacaccatgctccttcggcggcgtgtctgtgatcacaccaggcaccaatacaagcaaccaggtggccgtgctgtatcaggacgtgaactgtaccgaggtgcccgtggcaatccacgcagatcagctgacccctacatggcgggtgtactctaccggcagcaacgtgttccagacaagagccggatgcctgatcggagcagagcacgtgaacaatagctatgagtgcgacatccctatcggcgccggcatctgtgcctcctaccagacccagacaaactccccaaggagagcacggtctgtggcaagccagtccatcatcgcctataccatgagcctgggcgccgagaactccgtggcctactccaacaattctatcgccatccctaccaatttcacaatctccgtgaccacagagatcctgccagtgagcatgaccaagacatccgtggactgcacaatgtatatctgtggcgattccaccgagtgctctaatctgctgctgcagtacggctctttttgtacccagctgaacagagccctgacaggcatcgccgtggagcaggacaagaatacacaggaggtgttcgcccaggtgaagcaaatctacaagaccccacccatcaaggactttggcggcttcaactttagccagatcctgcccgatcctagcaagccatccaagcggtcttttatcgaggacctgctgttcaataaggtgaccctggccgatgccggcttcatcaagcagtatggcgattgcctgggcgacatcgccgccagagacctgatctgtgcccagaagtttaacggcctgaccgtgctgcctccactgctgacagatgagatgatcgcccagtacacatctgccctgctggcaggcaccatcacaagcggatggaccttcggcgcaggagccgccctgcagatcccctttgccatgcagatggcctatcggttcaatggcatcggcgtgacccagaatgtgctgtacgagaaccagaagctgatcgccaatcagtttaactccgccatcggcaagatccaggactctctgagctccacagcaagcgccctgggcaagctgcaggatgtggtgaatcagaacgcccaggccctgaacaccctggtgaagcagctgtctagcaatttcggcgccatctcctctgtgctgaacgatatcctgagccggctggacaaggtggaggcagaggtgcagatcgaccggctgatcacaggcagactgcagtccctgcagacctacgtgacacagcagctgatcagggcagcagagatcagggcatctgccaacctggcagcaaccaagatgagcgagtgcgtgctgggccagtccaagagagtggacttttgtggcaagggctatcacctgatgagcttcccacagtccgcccctcacggagtggtgtttctgcacgtgacctacgtgccagcccaggagaagaacttcaccacagcaccagcaatctgccacgatggcaaggcacactttcctagggagggcgtgttcgtgagcaatggcacccactggtttgtgacacagcgcaacttctacgagccacagatcatcaccacagacaatacattcgtgtccggcaactgtgacgtggtcatcggcatcgtgaacaataccgtgtatgatcctctgcagccagagctggactcttttaaggaggagctggataagtacttcaagaaccacaccagccccgacgtggatctgggcgacatctctggcatcaatgccagcgtggtgaacatccagaaggagatcgacaggctgaatgaggtggccaagaatctgaacgagtccctgatcgatctgcaggagctgggcaagtatgagcagtacatcaagtggccctggtatatctggctgggcttcatcgccggcctgatcgccatcgtgatggtgaccatcatgctgtgctgtatgacaagctgctgttcctgcctgaagggctgctgttcttgtggcagctgctgtaagtttgatgaggacgatagcgagcctgtgctgaagggcgtgaagctgcactacacctgagaattcaaccagcctcaagaacacccgaatggagtctctaagctacataataccaacttacactttacaaaatgttgtcccccaaaatgtagccattcgtatctgctcctaataaaaagaaagtttcttcacattctaaccagcctcaagaacacccgaatggagtctctaagctacataataccaacttacactttacaaaatgttgtcccccaaaatgtagccattcgtatctgctcctaataaaaagaaagtttcttcacattctaagcttaaaaaaaaaaaaaaaaaaaaaaaaaaaaaaaaaaaaaaaaaaaaaaaaaaaaaaaaaaaaaaaaaaaaaaaaaaaaaaaaaaaaaaaaaaaaaaaaaaaaaaaaaaaaaaaaaaaaaaaa

SEQ ID NO: 284 - DNA, 8556 bp, synthetic construct
  source 1..8556: mol_type = other DNA
taatacgactcactataaggatgggcggcgcatgagagaagcccagaccaattacctacccaaaatggagaaagttcacgttgacatcgaggaagacagcccattcctcagagctttgcagcggagcttcccgcagtttgaggtagaagccaagcaggtcactgataatgaccatgctaatgccagagcgttttcgcatctggcttcaaaactgatcgaaacggaggtggacccatccgacacgatccttgacattggaagtgcgcccgcccgcagaatgtattctaagcacaagtatcattgtatctgtccgatgagatgtgcggaagatccggacagattgtataagtatgcaactaagctgaagaaaaactgtaaggaaataactgataaggaattggacaagaaaatgaaggagctcgccgccgtcatgagcgaccctgacctggaaactgagactatgtgcctccacgacgacgagtcgtgtcgctacgaagggcaagtcgctgtttaccaggatgtatacgcggttgacggaccgacaagtctctatcaccaagccaataagggagttagagtcgcctactggataggctttgacaccaccccttttatgtttaagaacttggctggagcatatccatcatactctaccaactgggccgacgaaaccgtgttaacggctcgtaacataggcctatgcagctctgacgttatggagcggtcacgtagagggatgtccattcttagaaagaagtatttgaaaccatccaacaatgttctattctctgttggctcgaccatctaccacgagaagagggacttactgaggagctggcacctgccgtctgtatttcacttacgtggcaagcaaaattacacatgtcggtgtgagactatagttagttgcgacgggtacgtcgttaaaagaatagctatcagtccaggcctgtatgggaagccttcaggctatgctgctacgatgcaccgcgagggattcttgtgctgcaaagtgacagacacattgaacggggagagggtctcttttcccgtgtgcacgtatgtgccagctacattgtgtgaccaaatgactggcatactggcaacagatgtcagtgcggacgacgcgcaaaaactgctggttgggctcaaccagcgtatagtcgtcaacggtcgcacccagagaaacaccaataccatgaaaaattaccttttgcccgtagtggcccaggcatttgctaggtgggcaaaggaatataaggaagatcaagaagatgaaaggccactaggactacgagatagacagttagtcatggggtgttgttgggcttttagaaggcacaagataacatctatttataagcgcccggatacccaaaccatcatcaaagtgaacagcgatttccactcattcgtgctgcccaggataggcagtaacacattggagatcgggctgagaacaagaatcaggaaaatgttagaggagcacaaggagccgtcacctctcattaccgccgaggacgtacaagaagctaagtgcgcagccgatgaggctaaggaggtgcgtgaagccgaggagttgcgcgcagctctaccacctttggcagctgatgttgaggagcccactctggaagccgatgtcgacttgatgttacaagaggctggggccggctcagtggagacacctcgtggcttgataaaggttaccagctacgatggcgaggacaagatcggctcttacgctgtgctttctccgcaggctgtactcaagagtgaaaaattatcttgcatccaccctctcgctgaacaagtcatagtgataacacactctggccgaaaagggcgttatgccgtggaaccataccatggtaaagtagtggtgccagagggacatgcaatacccgtccaggactttcaagctctgagtgaaagtgccaccattgtgtacaacgaacgtgagttcgtaaacaggtacctgcaccatattgccacacatggaggagcgctgaacactgatgaagaatattacaaaactgtcaagcccagcgagcacgacggcgaatacctgtacgacatcgacaggaaacagtgcgtcaagaaagaactagtcactgggctagggctcacaggcgagctggtggatcctcccttccatgaattcgcctacgagagtctgagaacacgaccagccgctccttaccaagtaccaaccataggggtgtatggcgtgccaggatcaggcaagtctggcatcattaaaagcgcagtcaccaaaaaagatctagtggtgagcgccaagaaagaaaactgtgcagaaattataagggacgtcaagaaaatgaaagggctggacgtcaatgccagaactgtggactcagtgctcttgaatggatgcaaacaccccgtagagaccctgtatattgacgaagcttttgcttgtcatgcaggtactctcagagcgctcatagccattataagacctaaaaaggcagtgctctgcggggatcccaaacagtgcggtttttttaacatgatgtgcctgaaagtgcattttaaccacgagatttgcacacaagtcttccacaaaagcatctctcgccgttgcactaaatctgtgacttcggtcgtctcaaccttgttttacgacaaaaaaatgagaacgacgaatccgaaagagactaagattgtgattgacactaccggcagtaccaaacctaagcaggacgatctcattctcacttgtttcagagggtgggtgaagcagttgcaaatagattacaaaggcaacgaaataatgacggcagctgcctctcaagggctgacccgtaaaggtgtgtatgccgttcggtacaaggtgaatgaaaatcctctgtacgcacccacctcagaacatgtgaacgtcctactgacccgcacggaggaccgcatcgtgtggaaaacactagccggcgacccatggataaaaacactgactgccaagtaccctgggaatttcactgccacgatagaggagtggcaagcagagcatgatgccatcatgaggcacatcttggagagaccggaccctaccgacgtcttccagaataaggcaaacgtgtgttgggccaaggctttagtgccggtgctgaagaccgctggcatagacatgaccactgaacaatggaacactgtggattattttgaaacggacaaagctcactcagcagagatagtattgaaccaactatgcgtgaggttctttggactcgatctggactccggtctattttctgcacccactgttccgttatccattaggaataatcactgggataactccccgtcgcctaacatgtacgggctgaataaagaagtggtccgtcagctctctcgcaggtacccacaactgcctcgggcagttgccactggaagagtctatgacatgaacactggtacactgcgcaattatgatccgcgcataaacctagtacctgtaaacagaagactgcctcatgctttagtcctccaccataatgaacacccacagagtgacttttcttcattcgtcagcaaattgaagggcagaactgtcctggtggtcggggaaaagttgtccgtcccaggcaaaatggttgactggttgtcagaccggcctgaggctaccttcagagctcggctggatttaggcatcccaggtgatgtgcccaaatatgacataatatttgttaatgtgaggaccccatataaataccatcactatcagcagtgtgaagaccatgccattaagcttagcatgttgaccaagaaagcttgtctgcatctgaatcccggcggaacctgtgtcagcataggttatggttacgctgacagggccagcgaaagcatcattggtgctatagcgcggcagttcaagttttcccgggtatgcaaaccgaaatcctcacttgaagagacggaagttctgtttgtattcattgggtacgatcgcaaggcccgtacgcacaatccttacaagctttcatcaaccttgaccaacatttatacaggttccagactccacgaagccggatgtgcaccctcatatcatgtggtgcgaggggatattgccacggccaccgaaggagtgattataaatgctgctaacagcaaaggacaacctggcggaggggtgtgcggagcgctgtataagaaattcccggaaagcttcgatttacagccgatcgaagtaggaaaagcgcgactggtcaaaggtgcagctaaacatatcattcatgccgtaggaccaaacttcaacaaagtttcggaggttgaaggtgacaaacagttggcagaggcttatgagtccatcgctaagattgtcaacgataacaattacaagtcagtagcgattccactgttgtccaccggcatcttttccgggaacaaagatcgactaacccaatcattgaaccatttgctgacagctttagacaccactgatgcagatgtagccatatactgcagggacaagaaatgggaaatgactctcaaggaagcagtggctaggagagaagcagtggaggagatatgcatatccgacgactcttcagtgacagaacctgatgcagagctggtgagggtgcatccgaagagttctttggctggaaggaagggctacagcacaagcgatggcaaaactttctcatatttggaagggaccaagtttcaccaggcggccaaggatatagcagaaattaatgccatgtggcccgttgcaacggaggccaatgagcaggtatgcatgtatatcctcggagaaagcatgagcagtattaggtcgaaatgccccgtcgaagagtcggaagcctccacaccacctagcacgctgccttgcttgtgcatccatgccatgactccagaaagagtacagcgcctaaaagcctcacgtccagaacaaattactgtgtgctcatcctttccattgccgaagtatagaatcactggtgtgcagaagatccaatgctcccagcctatattgttctcaccgaaagtgcctgcgtatattcatccaaggaagtatctcgtggaaacaccaccggtagacgagactccggagccatcggcagagaaccaatccacagaggggacacctgaacaaccaccacttataaccgaggatgagaccaggactagaacgcctgagccgatcatcatcgaagaggaagaagaggatagcataagtttgctgtcagatggcccgacccaccaggtgctgcaagtcgaggcagacattcacgggccgccctctgtatctagctcatcctggtccattcctcatgcatccgactttgatgtggacagtttatccatacttgacaccctggagggagctagcgtgaccagcggggcaacgtcagccgagactaactcttacttcgcaaagagtatggagtttctggcgcgaccggtgcctgcgcctcgaacagtattcaggaaccctccacatcccgctccgcgcacaagaacaccgtcacttgcacccagcagggcctgctcgagaaccagcctagtttccaccccgccaggcgtgaatagggtgatcactagagaggagctcgaggcgcttaccccgtcacgcactcctagcaggtcggtctcgagaaccagcctggtctccaacccgccaggcgtaaatagggtgattacaagagaggagtttgaggcgttcgtagcacaacaacaatgacggtttgatgcgggtgcatacatcttttcctccgacaccggtcaagggcatttacaacaaaaatcagtaaggcaaacggtgctatccgaagtggtgttggagaggaccgaattggagatttcgtatgccccgcgcctcgaccaagaaaaagaagaattactacgcaagaaattacagttaaatcccacacctgctaacagaagcagataccagtccaggaaggtggagaacatgaaagccataacagctagacgtattctgcaaggcctagggcattatttgaaggcagaaggaaaagtggagtgctaccgaaccctgcatcctgttcctttgtattcatctagtgtgaaccgtgccttttcaagccccaaggtcgcagtggaagcctgtaacgccatgttgaaagagaactttccgactgtggcttcttactgtattattccagagtacgatgcctatttggacatggttgacggagcttcatgctgcttagacactgccagtttttgccctgcaaagctgcgcagctttccaaagaaacactcctatttggaacccacaatacgatcggcagtgccttcagcgatccagaacacgctccagaacgtcctggcagctgccacaaaaagaaattgcaatgtcacgcaaatgagagaattgcccgtattggattcggcggcctttaatgtggaatgcttcaagaaatatgcgtgtaataatgaatattgggaaacgtttaaagaaaaccccatcaggcttactgaagaaaacgtggtaaattacattaccaaattaaaaggaccaaaagctgctgcgctgtttgcgaagacacataatttgaatatgttgcaggacataccaatggacaggtttgtaatggacttaaagagagacgtgaaagtgactccaggaacaaaacatactgaagaacggcccaaggtacaggtgatccaggctgccgatccgctagcaacagcgtatctgtgcggaatccaccgagagctggttaggagattaaatgcggtcctgcttccgaacattcatacactgtttgatatgtcggctgaagactttgacgctattatagccgagcacttccagcctggggattgtgttctggaaactgacatcgcgtcgtttgataaaagtgaggacgacgccatggctctgaccgcgttaatgattctggaagacttaggtgtggacgcagagctgttgacgctgattgaggcggctttcggcgaaatttcatcaatacatttgcccactaaaactaaatttaaattcggagccatgatgaaatctggaatgttcctcacactgtttgtgaacacagtcattaacattgtaatcgcaagcagagtgttgagagaacggctaaccggatcaccatgtgcagcattcattggagatgacaatatcgtgaaaggagtcaaatcggacaaattaatggcagacaggtgcgccacctggttgaatatggaagtcaagattatagatgctgtggtgggcgagaaagcgccttatttctgtggagggtttattttgtgtgactccgtgaccggcacagcgtgccgtgtggcagaccccctaaaaaggctgtttaagcttggcaaacctctggcagcagacgatgaacatgatgatgacaggagaagggcattgcatgaagagtcaacacgctggaaccgagtgggtattctttcagagctgtgcaaggcagtagaatcaaggtatgaaaccgtaggaacttccatcatagttatggccatgactactctagctagcagtgttaaatcattcagctacctgagaggggcccctataactctctacggctaacctgaatggactacgacatagtctagtccgccaaggccaccatggtgagcaagggcgaggagctgttcaccggggtggtgcccatcctggtcgagctggacggcgacgtaaacggccacaagttcagcgtgtccggcgagggcgagggcgatgccacctacggcaagctgaccctgaagttcatctgcaccaccggcaagctgcccgtgccctggcccaccctcgtgaccaccctgacctacggcgtgcagtgcttcagccgctaccccgaccacatgaagcagcacgacttcttcaagtccgccatgcccgaaggctacgtccaggagcgcaccatcttcttcaaggacgacggcaactacaagacccgcgccgaggtgaagttcgagggcgacaccctggtgaaccgcatcgagctgaagggcatcgacttcaaggaggacggcaacatcctggggcacaagctggagtacaactacaacagccacaacgtctatatcatggccgacaagcagaagaacggcatcaaggtgaacttcaagatccgccacaacatcgaggacggcagcgtgcagctcgccgaccactaccagcagaacacccccatcggcgacggccccgtgctgctgcccgacaaccactacctgagcacccagtccgccctgagcaaagaccccaacgagaagcgcgatcacatggtcctgctggagttcgtgaccgccgccgggatcactctcggcatggacgagctgtacaagtgataaggcgcgcccacccagcggccgcatacagcagcaattggcaagctgcttacatagaactcgcggcgattggcatgccgccttaaaatttttattttatttttcttttcttttccgaatcggattttgtttttaatatttcaaaaaaaaaaaaaaaaaaaaaaaaaaaaaagcatatgactaaaaaaaaaaaaaaaaaaaaaaaaaaaaaaaaaaaaaaaaaaaaaaaaaaaaaaaaaaaaaaaaaat

SEQ ID NO: 285 - DNA, 4388 bp, synthetic construct
  source 1..4388: mol_type = other DNA
taatacgactcactataaggagaaaataacaaatctcaacacaacatatacaaaacaaacgaatctcaagcaatcaagcattctacttctattgcagcaatttaaatcatttcttttaaagcaaaagcaattttctgaaaattttcaccatttacgaacgatagcagccaccatgttcgtgtttctggtgctgctgcctctggtgagctcccagtgcgtgaatctgaccacaaggacccagctgccccctgcctataccaactccttcacacggggcgtgtactatcccgacaaggtgttccggagcagcgtgctgcactccacacaggatctgtttctgcctttcttttctaacgtgacctggttccacgccatccacgtgagcggcaccaatggcacaaagaggttcgacaacccagtgctgcccttcaatgatggcgtgtacttcgcctccaccgagaagtctaatatcatccgcggctggatctttggcaccacactggacagcaagacacagtccctgctgatcgtgaacaatgccaccaacgtggtcatcaaggtgtgcgagttccagttttgtaacgatccattcctgggcgtgtactatcacaagaacaataagtcttggatggagagcgagtttcgcgtgtattcctctgccaacaattgcacatttgagtacgtgtcccagcccttcctgatggacctggagggcaagcagggcaatttcaagaacctgcgggagttcgtgtttaagaacatcgatggctacttcaaaatctactccaagcacaccccaatcaatctggtgagagacctgccacagggcttctctgccctggagccactggtggatctgcccatcggcatcaacatcacccggtttcagacactgctggccctgcacagaagctacctgacaccaggcgacagctcctctggatggaccgcaggagcagcagcctactatgtgggctatctgcagcccaggaccttcctgctgaagtacaacgagaatggcaccatcacagacgcagtggattgcgcactggaccccctgtctgagaccaagtgtacactgaagtcctttaccgtggagaagggcatctatcagacaagcaacttcagggtgcagcctaccgagtccatcgtgcgctttcccaatatcacaaacctgtgcccttttggcgaggtgttcaatgcaaccaggttcgcaagcgtgtacgcatggaataggaagcgcatctccaactgcgtggccgactattctgtgctgtacaatagcgcctccttctctacctttaagtgctacggcgtgagccccacaaagctgaatgacctgtgctttaccaacgtgtacgccgattccttcgtgatcaggggcgacgaggtgcgccagatcgcaccaggacagacaggcaagatcgcagactacaactataagctgcctgacgatttcaccggctgcgtgatcgcctggaacagcaacaatctggatagcaaagtgggcggcaactacaattatctgtaccggctgtttagaaagtctaacctgaagccattcgagagggacatctccacagaaatctaccaggccggctctaccccctgcaatggcgtggagggctttaactgttatttccctctgcagagctacggcttccagccaacaaatggcgtgggctatcagccctaccgcgtggtggtgctgtcttttgagctgctgcacgcccctgcaacagtgtgcggaccaaagaagtccaccaatctggtgaagaacaagtgcgtgaacttcaacttcaacggactgaccggcacaggcgtgctgaccgagtccaacaagaagttcctgccttttcagcagttcggcagggacatcgcagataccacagacgccgtgcgcgaccctcagaccctggagatcctggatatcacaccatgctccttcggcggcgtgtctgtgatcacaccaggcaccaatacaagcaaccaggtggccgtgctgtatcaggacgtgaactgtaccgaggtgcccgtggcaatccacgcagatcagctgacccctacatggcgggtgtactctaccggcagcaacgtgttccagacaagagccggatgcctgatcggagcagagcacgtgaacaatagctatgagtgcgacatccctatcggcgccggcatctgtgcctcctaccagacccagacaaactccccaaggagagcacggtctgtggcaagccagtccatcatcgcctataccatgagcctgggcgccgagaactccgtggcctactccaacaattctatcgccatccctaccaatttcacaatctccgtgaccacagagatcctgccagtgagcatgaccaagacatccgtggactgcacaatgtatatctgtggcgattccaccgagtgctctaatctgctgctgcagtacggctctttttgtacccagctgaacagagccctgacaggcatcgccgtggagcaggacaagaatacacaggaggtgttcgcccaggtgaagcaaatctacaagaccccacccatcaaggactttggcggcttcaactttagccagatcctgcccgatcctagcaagccatccaagcggtcttttatcgaggacctgctgttcaataaggtgaccctggccgatgccggcttcatcaagcagtatggcgattgcctgggcgacatcgccgccagagacctgatctgtgcccagaagtttaacggcctgaccgtgctgcctccactgctgacagatgagatgatcgcccagtacacatctgccctgctggcaggcaccatcacaagcggatggaccttcggcgcaggagccgccctgcagatcccctttgccatgcagatggcctatcggttcaatggcatcggcgtgacccagaatgtgctgtacgagaaccagaagctgatcgccaatcagtttaactccgccatcggcaagatccaggactctctgagctccacagcaagcgccctgggcaagctgcaggatgtggtgaatcagaacgcccaggccctgaacaccctggtgaagcagctgtctagcaatttcggcgccatctcctctgtgctgaacgatatcctgagccggctggacaaggtggaggcagaggtgcagatcgaccggctgatcacaggcagactgcagtccctgcagacctacgtgacacagcagctgatcagggcagcagagatcagggcatctgccaacctggcagcaaccaagatgagcgagtgcgtgctgggccagtccaagagagtggacttttgtggcaagggctatcacctgatgagcttcccacagtccgcccctcacggagtggtgtttctgcacgtgacctacgtgccagcccaggagaagaacttcaccacagcaccagcaatctgccacgatggcaaggcacactttcctagggagggcgtgttcgtgagcaatggcacccactggtttgtgacacagcgcaacttctacgagccacagatcatcaccacagacaatacattcgtgtccggcaactgtgacgtggtcatcggcatcgtgaacaataccgtgtatgatcctctgcagccagagctggactcttttaaggaggagctggataagtacttcaagaaccacaccagccccgacgtggatctgggcgacatctctggcatcaatgccagcgtggtgaacatccagaaggagatcgacaggctgaatgaggtggccaagaatctgaacgagtccctgatcgatctgcaggagctgggcaagtatgagcagtacatcaagtggccctggtatatctggctgggcttcatcgccggcctgatcgccatcgtgatggtgaccatcatgctgtgctgtatgacaagctgctgttcctgcctgaagggctgctgttcttgtggcagctgctgtaagtttgatgaggacgatagcgagcctgtgctgaagggcgtgaagctgcactacacctgagaattcaaccagcctcaagaacacccgaatggagtctctaagctacataataccaacttacactttacaaaatgttgtcccccaaaatgtagccattcgtatctgctcctaataaaaagaaagtttcttcacattctaaccagcctcaagaacacccgaatggagtctctaagctacataataccaacttacactttacaaaatgttgtcccccaaaatgtagccattcgtatctgctcctaataaaaagaaagtttcttcacattctaagcttaaaaaaaaaaaaaaaaaaaaaaaaaaaaaaaaaaaaaaaaaaaaaaaaaaaaaaaaaaaaaaaaaaaaaaaaaaaaaaaaaaaaaaaaaaaaaaaaaaaaaaaaaaaaaaaaaaaaaaaa

SEQ ID NO: 286 - DNA, 12365 bp, synthetic construct
  source 1..12365: mol_type = other DNA
taatacgactcactataaggatgggcggcgcatgagagaagcccagaccaattacctacccaaaatggagaaagttcacgttgacatcgaggaagacagcccattcctcagagctttgcagcggagcttcccgcagtttgaggtagaagccaagcaggtcactgataatgaccatgctaatgccagagcgttttcgcatctggcttcaaaactgatcgaaacggaggtggacccatccgacacgatccttgacattggaagtgcgcccgcccgcagaatgtattctaagcacaagtatcattgtatctgtccgatgagatgtgcggaagatccggacagattgtataagtatgcaactaagctgaagaaaaactgtaaggaaataactgataaggaattggacaagaaaatgaaggagctcgccgccgtcatgagcgaccctgacctggaaactgagactatgtgcctccacgacgacgagtcgtgtcgctacgaagggcaagtcgctgtttaccaggatgtatacgcggttgacggaccgacaagtctctatcaccaagccaataagggagttagagtcgcctactggataggctttgacaccaccccttttatgtttaagaacttggctggagcatatccatcatactctaccaactgggccgacgaaaccgtgttaacggctcgtaacataggcctatgcagctctgacgttatggagcggtcacgtagagggatgtccattcttagaaagaagtatttgaaaccatccaacaatgttctattctctgttggctcgaccatctaccacgagaagagggacttactgaggagctggcacctgccgtctgtatttcacttacgtggcaagcaaaattacacatgtcggtgtgagactatagttagttgcgacgggtacgtcgttaaaagaatagctatcagtccaggcctgtatgggaagccttcaggctatgctgctacgatgcaccgcgagggattcttgtgctgcaaagtgacagacacattgaacggggagagggtctcttttcccgtgtgcacgtatgtgccagctacattgtgtgaccaaatgactggcatactggcaacagatgtcagtgcggacgacgcgcaaaaactgctggttgggctcaaccagcgtatagtcgtcaacggtcgcacccagagaaacaccaataccatgaaaaattaccttttgcccgtagtggcccaggcatttgctaggtgggcaaaggaatataaggaagatcaagaagatgaaaggccactaggactacgagatagacagttagtcatggggtgttgttgggcttttagaaggcacaagataacatctatttataagcgcccggatacccaaaccatcatcaaagtgaacagcgatttccactcattcgtgctgcccaggataggcagtaacacattggagatcgggctgagaacaagaatcaggaaaatgttagaggagcacaaggagccgtcacctctcattaccgccgaggacgtacaagaagctaagtgcgcagccgatgaggctaaggaggtgcgtgaagccgaggagttgcgcgcagctctaccacctttggcagctgatgttgaggagcccactctggaagccgatgtcgacttgatgttacaagaggctggggccggctcagtggagacacctcgtggcttgataaaggttaccagctacgatggcgaggacaagatcggctcttacgctgtgctttctccgcaggctgtactcaagagtgaaaaattatcttgcatccaccctctcgctgaacaagtcatagtgataacacactctggccgaaaagggcgttatgccgtggaaccataccatggtaaagtagtggtgccagagggacatgcaatacccgtccaggactttcaagctctgagtgaaagtgccaccattgtgtacaacgaacgtgagttcgtaaacaggtacctgcaccatattgccacacatggaggagcgctgaacactgatgaagaatattacaaaactgtcaagcccagcgagcacgacggcgaatacctgtacgacatcgacaggaaacagtgcgtcaagaaagaactagtcactgggctagggctcacaggcgagctggtggatcctcccttccatgaattcgcctacgagagtctgagaacacgaccagccgctccttaccaagtaccaaccataggggtgtatggcgtgccaggatcaggcaagtctggcatcattaaaagcgcagtcaccaaaaaagatctagtggtgagcgccaagaaagaaaactgtgcagaaattataagggacgtcaagaaaatgaaagggctggacgtcaatgccagaactgtggactcagtgctcttgaatggatgcaaacaccccgtagagaccctgtatattgacgaagcttttgcttgtcatgcaggtactctcagagcgctcatagccattataagacctaaaaaggcagtgctctgcggggatcccaaacagtgcggtttttttaacatgatgtgcctgaaagtgcattttaaccacgagatttgcacacaagtcttccacaaaagcatctctcgccgttgcactaaatctgtgacttcggtcgtctcaaccttgttttacgacaaaaaaatgagaacgacgaatccgaaagagactaagattgtgattgacactaccggcagtaccaaacctaagcaggacgatctcattctcacttgtttcagagggtgggtgaagcagttgcaaatagattacaaaggcaacgaaataatgacggcagctgcctctcaagggctgacccgtaaaggtgtgtatgccgttcggtacaaggtgaatgaaaatcctctgtacgcacccacctcagaacatgtgaacgtcctactgacccgcacggaggaccgcatcgtgtggaaaacactagccggcgacccatggataaaaacactgactgccaagtaccctgggaatttcactgccacgatagaggagtggcaagcagagcatgatgccatcatgaggcacatcttggagagaccggaccctaccgacgtcttccagaataaggcaaacgtgtgttgggccaaggctttagtgccggtgctgaagaccgctggcatagacatgaccactgaacaatggaacactgtggattattttgaaacggacaaagctcactcagcagagatagtattgaaccaactatgcgtgaggttctttggactcgatctggactccggtctattttctgcacccactgttccgttatccattaggaataatcactgggataactccccgtcgcctaacatgtacgggctgaataaagaagtggtccgtcagctctctcgcaggtacccacaactgcctcgggcagttgccactggaagagtctatgacatgaacactggtacactgcgcaattatgatccgcgcataaacctagtacctgtaaacagaagactgcctcatgctttagtcctccaccataatgaacacccacagagtgacttttcttcattcgtcagcaaattgaagggcagaactgtcctggtggtcggggaaaagttgtccgtcccaggcaaaatggttgactggttgtcagaccggcctgaggctaccttcagagctcggctggatttaggcatcccaggtgatgtgcccaaatatgacataatatttgttaatgtgaggaccccatataaataccatcactatcagcagtgtgaagaccatgccattaagcttagcatgttgaccaagaaagcttgtctgcatctgaatcccggcggaacctgtgtcagcataggttatggttacgctgacagggccagcgaaagcatcattggtgctatagcgcggcagttcaagttttcccgggtatgcaaaccgaaatcctcacttgaagagacggaagttctgtttgtattcattgggtacgatcgcaaggcccgtacgcacaatccttacaagctttcatcaaccttgaccaacatttatacaggttccagactccacgaagccggatgtgcaccctcatatcatgtggtgcgaggggatattgccacggccaccgaaggagtgattataaatgctgctaacagcaaaggacaacctggcggaggggtgtgcggagcgctgtataagaaattcccggaaagcttcgatttacagccgatcgaagtaggaaaagcgcgactggtcaaaggtgcagctaaacatatcattcatgccgtaggaccaaacttcaacaaagtttcggaggttgaaggtgacaaacagttggcagaggcttatgagtccatcgctaagattgtcaacgataacaattacaagtcagtagcgattccactgttgtccaccggcatcttttccgggaacaaagatcgactaacccaatcattgaaccatttgctgacagctttagacaccactgatgcagatgtagccatatactgcagggacaagaaatgggaaatgactctcaaggaagcagtggctaggagagaagcagtggaggagatatgcatatccgacgactcttcagtgacagaacctgatgcagagctggtgagggtgcatccgaagagttctttggctggaaggaagggctacagcacaagcgatggcaaaactttctcatatttggaagggaccaagtttcaccaggcggccaaggatatagcagaaattaatgccatgtggcccgttgcaacggaggccaatgagcaggtatgcatgtatatcctcggagaaagcatgagcagtattaggtcgaaatgccccgtcgaagagtcggaagcctccacaccacctagcacgctgccttgcttgtgcatccatgccatgactccagaaagagtacagcgcctaaaagcctcacgtccagaacaaattactgtgtgctcatcctttccattgccgaagtatagaatcactggtgtgcagaagatccaatgctcccagcctatattgttctcaccgaaagtgcctgcgtatattcatccaaggaagtatctcgtggaaacaccaccggtagacgagactccggagccatcggcagagaaccaatccacagaggggacacctgaacaaccaccacttataaccgaggatgagaccaggactagaacgcctgagccgatcatcatcgaagaggaagaagaggatagcataagtttgctgtcagatggcccgacccaccaggtgctgcaagtcgaggcagacattcacgggccgccctctgtatctagctcatcctggtccattcctcatgcatccgactttgatgtggacagtttatccatacttgacaccctggagggagctagcgtgaccagcggggcaacgtcagccgagactaactcttacttcgcaaagagtatggagtttctggcgcgaccggtgcctgcgcctcgaacagtattcaggaaccctccacatcccgctccgcgcacaagaacaccgtcacttgcacccagcagggcctgctcgagaaccagcctagtttccaccccgccaggcgtgaatagggtgatcactagagaggagctcgaggcgcttaccccgtcacgcactcctagcaggtcggtctcgagaaccagcctggtctccaacccgccaggcgtaaatagggtgattacaagagaggagtttgaggcgttcgtagcacaacaacaatgacggtttgatgcgggtgcatacatcttttcctccgacaccggtcaagggcatttacaacaaaaatcagtaaggcaaacggtgctatccgaagtggtgttggagaggaccgaattggagatttcgtatgccccgcgcctcgaccaagaaaaagaagaattactacgcaagaaattacagttaaatcccacacctgctaacagaagcagataccagtccaggaaggtggagaacatgaaagccataacagctagacgtattctgcaaggcctagggcattatttgaaggcagaaggaaaagtggagtgctaccgaaccctgcatcctgttcctttgtattcatctagtgtgaaccgtgccttttcaagccccaaggtcgcagtggaagcctgtaacgccatgttgaaagagaactttccgactgtggcttcttactgtattattccagagtacgatgcctatttggacatggttgacggagcttcatgctgcttagacactgccagtttttgccctgcaaagctgcgcagctttccaaagaaacactcctatttggaacccacaatacgatcggcagtgccttcagcgatccagaacacgctccagaacgtcctggcagctgccacaaaaagaaattgcaatgtcacgcaaatgagagaattgcccgtattggattcggcggcctttaatgtggaatgcttcaagaaatatgcgtgtaataatgaatattgggaaacgtttaaagaaaaccccatcaggcttactgaagaaaacgtggtaaattacattaccaaattaaaaggaccaaaagctgctgcgctgtttgcgaagacacataatttgaatatgttgcaggacataccaatggacaggtttgtaatggacttaaagagagacgtgaaagtgactccaggaacaaaacatactgaagaacggcccaaggtacaggtgatccaggctgccgatccgctagcaacagcgtatctgtgcggaatccaccgagagctggttaggagattaaatgcggtcctgcttccgaacattcatacactgtttgatatgtcggctgaagactttgacgctattatagccgagcacttccagcctggggattgtgttctggaaactgacatcgcgtcgtttgataaaagtgaggacgacgccatggctctgaccgcgttaatgattctggaagacttaggtgtggacgcagagctgttgacgctgattgaggcggctttcggcgaaatttcatcaatacatttgcccactaaaactaaatttaaattcggagccatgatgaaatctggaatgttcctcacactgtttgtgaacacagtcattaacattgtaatcgcaagcagagtgttgagagaacggctaaccggatcaccatgtgcagcattcattggagatgacaatatcgtgaaaggagtcaaatcggacaaattaatggcagacaggtgcgccacctggttgaatatggaagtcaagattatagatgctgtggtgggcgagaaagcgccttatttctgtggagggtttattttgtgtgactccgtgaccggcacagcgtgccgtgtggcagaccccctaaaaaggctgtttaagcttggcaaacctctggcagcagacgatgaacatgatgatgacaggagaagggcattgcatgaagagtcaacacgctggaaccgagtgggtattctttcagagctgtgcaaggcagtagaatcaaggtatgaaaccgtaggaacttccatcatagttatggccatgactactctagctagcagtgttaaatcattcagctacctgagaggggcccctataactctctacggctaacctgaatggactacgacatagtctagtccgccaaggccaccatggtgagcaagggcgaggagctgttcaccggggtggtgcccatcctggtcgagctggacggcgacgtaaacggccacaagttcagcgtgtccggcgagggcgagggcgatgccacctacggcaagctgaccctgaagttcatctgcaccaccggcaagctgcccgtgccctggcccaccctcgtgaccaccctgacctacggcgtgcagtgcttcagccgctaccccgaccacatgaagcagcacgacttcttcaagtccgccatgcccgaaggctacgtccaggagcgcaccatcttcttcaaggacgacggcaactacaagacccgcgccgaggtgaagttcgagggcgacaccctggtgaaccgcatcgagctgaagggcatcgacttcaaggaggacggcaacatcctggggcacaagctggagtacaactacaacagccacaacgtctatatcatggccgacaagcagaagaacggcatcaaggtgaacttcaagatccgccacaacatcgaggacggcagcgtgcagctcgccgaccactaccagcagaacacccccatcggcgacggccccgtgctgctgcccgacaaccactacctgagcacccagtccgccctgagcaaagaccccaacgagaagcgcgatcacatggtcctgctggagttcgtgaccgccgccgggatcactctcggcatggacgagctgtacaagatgttcgtgtttctggtgctgctgcctctggtgagctcccagtgcgtgaatctgaccacaaggacccagctgccccctgcctataccaactccttcacacggggcgtgtactatcccgacaaggtgttccggagcagcgtgctgcactccacacaggatctgtttctgcctttcttttctaacgtgacctggttccacgccatccacgtgagcggcaccaatggcacaaagaggttcgacaacccagtgctgcccttcaatgatggcgtgtacttcgcctccaccgagaagtctaatatcatccgcggctggatctttggcaccacactggacagcaagacacagtccctgctgatcgtgaacaatgccaccaacgtggtcatcaaggtgtgcgagttccagttttgtaacgatccattcctgggcgtgtactatcacaagaacaataagtcttggatggagagcgagtttcgcgtgtattcctctgccaacaattgcacatttgagtacgtgtcccagcccttcctgatggacctggagggcaagcagggcaatttcaagaacctgcgggagttcgtgtttaagaacatcgatggctacttcaaaatctactccaagcacaccccaatcaatctggtgagagacctgccacagggcttctctgccctggagccactggtggatctgcccatcggcatcaacatcacccggtttcagacactgctggccctgcacagaagctacctgacaccaggcgacagctcctctggatggaccgcaggagcagcagcctactatgtgggctatctgcagcccaggaccttcctgctgaagtacaacgagaatggcaccatcacagacgcagtggattgcgcactggaccccctgtctgagaccaagtgtacactgaagtcctttaccgtggagaagggcatctatcagacaagcaacttcagggtgcagcctaccgagtccatcgtgcgctttcccaatatcacaaacctgtgcccttttggcgaggtgttcaatgcaaccaggttcgcaagcgtgtacgcatggaataggaagcgcatctccaactgcgtggccgactattctgtgctgtacaatagcgcctccttctctacctttaagtgctacggcgtgagccccacaaagctgaatgacctgtgctttaccaacgtgtacgccgattccttcgtgatcaggggcgacgaggtgcgccagatcgcaccaggacagacaggcaagatcgcagactacaactataagctgcctgacgatttcaccggctgcgtgatcgcctggaacagcaacaatctggatagcaaagtgggcggcaactacaattatctgtaccggctgtttagaaagtctaacctgaagccattcgagagggacatctccacagaaatctaccaggccggctctaccccctgcaatggcgtggagggctttaactgttatttccctctgcagagctacggcttccagccaacaaatggcgtgggctatcagccctaccgcgtggtggtgctgtcttttgagctgctgcacgcccctgcaacagtgtgcggaccaaagaagtccaccaatctggtgaagaacaagtgcgtgaacttcaacttcaacggactgaccggcacaggcgtgctgaccgagtccaacaagaagttcctgccttttcagcagttcggcagggacatcgcagataccacagacgccgtgcgcgaccctcagaccctggagatcctggatatcacaccatgctccttcggcggcgtgtctgtgatcacaccaggcaccaatacaagcaaccaggtggccgtgctgtatcaggacgtgaactgtaccgaggtgcccgtggcaatccacgcagatcagctgacccctacatggcgggtgtactctaccggcagcaacgtgttccagacaagagccggatgcctgatcggagcagagcacgtgaacaatagctatgagtgcgacatccctatcggcgccggcatctgtgcctcctaccagacccagacaaactccccaaggagagcacggtctgtggcaagccagtccatcatcgcctataccatgagcctgggcgccgagaactccgtggcctactccaacaattctatcgccatccctaccaatttcacaatctccgtgaccacagagatcctgccagtgagcatgaccaagacatccgtggactgcacaatgtatatctgtggcgattccaccgagtgctctaatctgctgctgcagtacggctctttttgtacccagctgaacagagccctgacaggcatcgccgtggagcaggacaagaatacacaggaggtgttcgcccaggtgaagcaaatctacaagaccccacccatcaaggactttggcggcttcaactttagccagatcctgcccgatcctagcaagccatccaagcggtcttttatcgaggacctgctgttcaataaggtgaccctggccgatgccggcttcatcaagcagtatggcgattgcctgggcgacatcgccgccagagacctgatctgtgcccagaagtttaacggcctgaccgtgctgcctccactgctgacagatgagatgatcgcccagtacacatctgccctgctggcaggcaccatcacaagcggatggaccttcggcgcaggagccgccctgcagatcccctttgccatgcagatggcctatcggttcaatggcatcggcgtgacccagaatgtgctgtacgagaaccagaagctgatcgccaatcagtttaactccgccatcggcaagatccaggactctctgagctccacagcaagcgccctgggcaagctgcaggatgtggtgaatcagaacgcccaggccctgaacaccctggtgaagcagctgtctagcaatttcggcgccatctcctctgtgctgaacgatatcctgagccggctggacaaggtggaggcagaggtgcagatcgaccggctgatcacaggcagactgcagtccctgcagacctacgtgacacagcagctgatcagggcagcagagatcagggcatctgccaacctggcagcaaccaagatgagcgagtgcgtgctgggccagtccaagagagtggacttttgtggcaagggctatcacctgatgagcttcccacagtccgcccctcacggagtggtgtttctgcacgtgacctacgtgccagcccaggagaagaacttcaccacagcaccagcaatctgccacgatggcaaggcacactttcctagggagggcgtgttcgtgagcaatggcacccactggtttgtgacacagcgcaacttctacgagccacagatcatcaccacagacaatacattcgtgtccggcaactgtgacgtggtcatcggcatcgtgaacaataccgtgtatgatcctctgcagccagagctggactcttttaaggaggagctggataagtacttcaagaaccacaccagccccgacgtggatctgggcgacatctctggcatcaatgccagcgtggtgaacatccagaaggagatcgacaggctgaatgaggtggccaagaatctgaacgagtccctgatcgatctgcaggagctgggcaagtatgagcagtacatcaagtggccctggtatatctggctgggcttcatcgccggcctgatcgccatcgtgatggtgaccatcatgctgtgctgtatgacaagctgctgttcctgcctgaagggctgctgttcttgtggcagctgctgtaagtttgatgaggacgatagcgagcctgtgctgaagggcgtgaagctgcactacacctaaggcgcgcccacccagcggccgcatacagcagcaattggcaagctgcttacatagaactcgcggcgattggcatgccgccttaaaatttttattttatttttcttttcttttccgaatcggattttgtttttaatatttcaaaaaaaaaaaaaaaaaaaaaaaaaaaaaaaaaaaaaaaaaaaaaaaaaaaaaaaaaaaaaaaaaaaaaaaaaaaaaaaaaaaaaaaaaaaaaaaaaaaa
